(19) United States
(12) Patent Application Publication
(10) Pub. No.: US 2007/0244192 A1
(43) Pub. Date: Oct. 18, 2007

(54) PLANT SEED OILS CONTAINING POLYUNSATURATED FATTY ACIDS

(75) Inventor: James G. Metz, Longmont, CO (US)

Correspondence Address: SHERIDAN ROSS PC, 1560 BROADWAY, SUITE 1200, DENVER, CO, 80202, US

(73) Assignee: MARTEK BIOSCIENCES CORPORATION, Columbia, MD (US)

(21) Appl. No.: 11/686,866

(22) Filed: Mar. 15, 2007

Related U.S. Application Data
(63) Continuation-in-part of application No. 10/965,017, filed on Oct. 13, 2004, now Pat. No. 7,217,856.
Application No. 10/965,017 is a continuation-in-part of application No. 10/810,352, filed on Mar. 26, 2004, now Pat. No. 7,211,418.
Application No. 10/965,017 is a continuation-in-part of application No. 10/124,800, filed on Apr. 16, 2002, now Pat. No. 7,247,461.
Application No. 10/965,017 is a continuation-in-part of application No. 09/231,899, filed on Jan. 14, 1999, now Pat. No. 6,566,583.
(63) Continuation-in-part of application No. 11/452,138, filed on Jun. 12, 2006.
(60) Provisional application No. 60/783,205, filed on Mar. 15, 2006.
(60) Provisional application No. 60/784,616, filed on Mar. 21, 2006.
(60) Provisional application No. 60/457,979, filed on Mar. 26, 2003.
(60) Provisional application No. 60/284,066, filed on Apr. 16, 2001.
(60) Provisional application No. 60/298,796, filed on Jun. 15, 2001.
(60) Provisional application No. 60/323,269, filed on Sep. 18, 2001.
(60) Provisional application No. 60/784,616, filed on Mar. 21, 2006.
(60) Provisional application No. 60/689,167, filed on Jun. 10, 2005.

(51) Int. Cl. A01H 5/10; A01H 5/00; A23D 9/00; A61K 31/202

(52) U.S. Cl. 514/560; 426/601; 426/629; 554/9; 800/295; 800/312; 800/317.3; 800/320.1; 800/322

(57) ABSTRACT

Disclosed are plants that have been genetically modified to express a PKS-like system for the production of PUFAs (a PUFA PKS system), wherein oils produced by the plant contain at least one PUFA produced by the PUFA PKS system and are free of the mixed shorter-chain and less unsaturated PUFAs that are fatty acid products produced by the modification of products of the FAS system in standard fatty acid pathways. Also disclosed are the oil seeds, oils, and products comprising such oils produced by this system, as well as methods for producing such plants.

### CROSS-REFERENCE TO RELATED APPLICATIONS

[0001] This application claims the benefit of priority under 35 U.S.C. § 119(e) from U.S. Provisional Application Ser. No. 60/784,616, filed Mar. 21, 2006, and from U.S. Provisional Application Ser. No. 60/783,205, filed Mar. 15, 2006. The entire disclosure of each of U.S. Provisional Application Ser. No. 60/784,616 and U.S. Provisional Application Ser. No. 60/783,205, filed Mar. 15, 2006 is incorporated herein by reference.

[0002] This application is also a continuation-in-part under 35 U.S.C. § 120 of U.S. patent application Ser. No. 10/965,017, filed Oct. 13, 2004, which is a continuation-in-part of U.S. patent application Ser. No. 10/810,352, filed Mar. 26, 2004, which claims the benefit of priority under 35 U.S.C. § 119(e) from U.S. Provisional Application Ser. No. 60/457,979, filed Mar. 26, 2003. U.S. patent application Ser. No. 10/810,352 is also a continuation-in-part under 35 U.S.C. § 120 of U.S. patent application Ser. No. 10/124,800, filed Apr. 16, 2002, which claims the benefit of priority under 35 U.S.C. § 119(e) to: U.S. Provisional Application Ser. No. 60/284,066, filed Apr. 16, 2001; U.S. Provisional Application Ser. No. 60/298,796, filed Jun. 15, 2001; and U.S. Provisional Application Ser. No. 60/323,269, filed Sep. 18, 2001. U.S. patent application Ser. No. 10/124,800, supra, is also a continuation-in-part of U.S. application Ser. No. 09/231,899, filed Jan. 14, 1999, now U.S. Pat. No. 6,566,583.

[0003] This application is also a continuation-in-part under 35 U.S.C. § 120 of U.S. application Ser. No. 11/452,138, filed Jun. 12, 2006, which claims the benefit of priority under 35 U.S.C. § 119(e) from U.S. Provisional Application No. 60/784,616, filed Mar. 21, 2006, and from U.S. Provisional Application No. 60/689,167, filed Jun. 10, 2005.

[0004] Each of the above-identified applications is incorporated herein by reference in its entirety.

### FIELD OF THE INVENTION

[0005] This invention generally relates to the production of polyunsaturated fatty acids (PUFAs) in plants, including oil seed plants, that have been genetically modified to express a PKS-like system for the production of PUFAs (a PUFA PKS system), and to the oil seeds, oils, and products comprising such oils produced by this system. The oils produced by the plant contain at least one PUFA produced by the PUFA PKS system and are free of the mixed shorter-chain and less unsaturated PUFAs that are fatty acid products produced by the modification of products of the FAS system in standard fatty acid pathways.

### BACKGROUND OF THE INVENTION

[0006] Polyketide synthase (PKS) systems are generally known in the art as enzyme complexes related to fatty acid synthase (FAS) systems, but which are often highly modified to produce specialized products that typically show little resemblance to fatty acids. It has now been shown, however, that PKS-like systems, also referred to herein as PUFA PKS systems or PUFA synthase systems, exist in marine bacteria and certain eukaryotic organisms that are capable of synthesizing polyunsaturated fatty acids (PUFAs) from acetyl-CoA and malonyl-CoA. The PUFA PKS pathways for PUFA synthesis in Shewanella and another marine bacteria, Vibrio marinus, are described in detail in U.S. Pat. No. 6,140,486. The PUFA PKS pathways for PUFA synthesis in the eukaryotic Thraustochytrid, Schizochytrium, is described in detail in U.S. Pat. No. 6,566,583. The PUFA PKS pathways for PUFA synthesis in eukaryotes such as members of Thraustochytriales, including the additional description of a PUFA PKS system in Schizochytrium and the identification of a PUFA PKS system in Thraustochytrium, including details regarding uses of these systems, are described in detail in U.S. Patent Application Publication No. 20020194641, published Dec. 19, 2002 and in PCT Publication No. WO 2006/135866, published Dec. 21, 2006. U.S. Patent Application Publication No. 20040235127, published Nov. 25, 2004, discloses the detailed structural description of a PUFA PKS system in Thraustochytrium, and further detail regarding the production of eicosapentaenoic acid (C20:5, ω-3) (EPA) and other PUFAs using such systems. U.S. Patent Application Publication No. 20050100995, published May 12, 2005, discloses the structural and functional description of PUFA PKS systems in Shewanella olleyana and Shewanella japonica, and uses of such systems. These applications also disclose the genetic modification of organisms, including microorganisms and plants, with the genes comprising the PUFA PKS pathway and the production of PUFAs by such organisms. Furthermore, PCT Patent Publication No. WO 05/097982 describes a PUFA PKS system in Ulkenia, and U.S. Patent Application Publication No. 20050014231 describes PUFA PKS genes and proteins from Thraustochytrium aureum. Each of the above-identified applications is incorporated by reference herein in its entirety.

[0007] Polyunsaturated fatty acids (PUFAs) are considered to be useful for nutritional, pharmaceutical, industrial, and other purposes. The current supply of PUFAs from natural sources and from chemical synthesis is not sufficient for commercial needs. Vegetable oils derived from oil seed crops are relatively inexpensive and do not have the contamination issues associated with fish oils. However, the PUFAs found in commercially developed plant oils are typically limited to linoleic acid (eighteen carbons with 2 double bonds, in the delta 9 and 12 positions—18:2 delta 9,12) and linolenic acid (18:3 delta 9,12,15). In the conventional pathway (i.e., the “standard” pathway or “classical” pathway) for PUFA synthesis, medium chain-length saturated fatty acids (products of a fatty acid synthase (FAS) system) are modified by a series of elongation and desaturation reactions. The substrates for the elongation reaction are fatty acyl-CoA (the fatty acid chain to be elongated) and malonyl-CoA (the source of the 2 carbons added during each elongation reaction). The product of the elongase reaction is a fatty acyl-CoA that has two additional carbons in the linear chain. The desaturases create cis double bonds in the preexisting fatty acid chain by extraction of 2 hydrogens in an oxygen-dependant reaction. The substrates for the desaturases are either acyl-CoA (in some animals) or the fatty acid that is esterified to the glycerol backbone of a PL (e.g. phosphatidylcholine).

[0008] Therefore, because a number of separate desaturase and elongase enzymes are required for fatty acid synthesis from linoleic and linolenic acids to produce the more unsaturated and longer chain PUFAs, engineering plant host cells for the expression of PUFAs such as eicosapentaenoic acid (EPA) and docosahexaenoic acid (DHA) may require expression of several separate enzymes to achieve synthesis. Additionally, for production of useable quantities of such PUFAs, additional engineering efforts may be required. Therefore, it is of interest to obtain genetic material involved in PUFA biosynthesis from species that naturally produce these fatty acids (e.g., from a PUFA PKS system) and to express the isolated material alone or in combination in a heterologous system which can be manipulated to allow production of commercial quantities of PUFAs.

[0009] There have been many efforts to produce PUFAs in oil-seed crop plants by modification of the endogenously-produced fatty acids. Genetic modification of these plants with various individual genes for fatty acid elongases and desaturases has produced leaves or seeds containing significant levels of PUFAs such as EPA, but also containing significant levels of mixed shorter-chain and less unsaturated PUFAs (Qi et al., Nature Biotech. 22:739 (2004); PCT Publication No. WO 04/071467; Abbadi et al., Plant Cell 16:1 (2004)); Napier and Sayanova, Proceedings of the Nutrition Society (2005), 64:387-393; Robert et al., Functional Plant Biology (2005) 32:473-479; or U.S. Patent Application Publication 2004/0172682.

[0010] Therefore, there remains a need in the art for a method to efficiently and effectively produce quantities of lipids (e.g., triacylglycerol (TAG) and phospholipid (PL)) enriched in desired PUFAs in oil-seed plants.

### SUMMARY OF THE INVENTION

[0011] One embodiment of the invention relates to a plant or a part of the plant, wherein the total fatty acid profile in the plant or part of the plant comprises at least about 0.5% by weight of at least one polyunsaturated fatty acid (PUFA) having at least twenty carbons and four or more carbon-carbon double bonds, and wherein the total fatty acid profile in the plant or part of the plant contains less than 5% in total of all of the following PUFAs: gamma-linolenic acid (GLA; 18:3, n-6), PUFAs having 18 carbons and four carbon-carbon double bonds, PUFAs having 20 carbons and three carbon-carbon double bonds, and PUFAs having 22 carbons and two or three carbon-carbon double bonds.

[0012] Yet another embodiment of the invention relates to a plant or a part of the plant, wherein the total fatty acid profile in the plant or part of the plant comprises at least about 0.5% by weight of at least one polyunsaturated fatty acid (PUFA) having at least twenty carbons and four or more carbon-carbon double bonds, and wherein the total fatty acid profile in the plant or part of the plant contains less than 1% of each of the following PUFAs: gamma-linolenic acid (GLA; 18:3, n-6), PUFAs having 18 carbons and four carbon-carbon double bonds, PUFAs having 20 carbons and three carbon-carbon double bonds, and PUFAs having 22 carbons and two or three carbon-carbon double bonds.

[0013] Another embodiment of the invention relates to a plant or a part of the plant, wherein the total fatty acid profile in the plant or part of the plant comprises at least about 0.5% by weight of at least one polyunsaturated fatty acid (PUFA) having at least twenty carbons and four or more carbon-carbon double bonds, and wherein the total fatty acid profile in the plant or part of the plant contains less than 2% of gamma-linolenic acid (GLA; 18:3, n-6) and dihomo-gamma-linolenic acid (DGLA or HGLA; 20:3, n-6). In one aspect of this embodiment, the total fatty acid profile in the plant or part of the plant contains less than 1% by weight of gamma-linolenic acid (GLA; 18:3, n-6) and dihomo-gamma-linolenic acid (DGLA or HGLA; 20:3, n-6).

[0014] Yet another embodiment of the invention relates to a plant or a part of the plant, wherein the total fatty acid profile in the plant or part of the plant comprises at least about 0.5% by weight of at least one polyunsaturated fatty acid (PUFA) having at least twenty carbons and four or more carbon-carbon double bonds, and wherein the total fatty acid profile in the plant or part of the plant contains less than 1% of gamma-linolenic acid (GLA; 18:3, n-6). In one aspect of this embodiment, the total fatty acid profile in the plant or part of the plant contains less than 0.5% by weight of gamma-linolenic acid (GLA; 18:3, n-6).

[0015] Another embodiment of the invention relates to a plant or part of a plant, wherein the plant has been genetically modified to express enzymes that produce at least one polyunsaturated fatty acid (PUFA) having at least twenty carbons and four or more carbon-carbon double bonds, wherein the total fatty acid profile in the plant or part of the plant comprises at least about 0.5% by weight of said at least one PUFA, and wherein the total fatty acids produced by said enzymes, other than said at least one PUFA, comprise less than about 10% of the total fatty acids produced by said plant. In one aspect of this embodiment, the total fatty acids produced by said enzymes, other than said at least one PUFA, comprise less than 5% by weight of the total fatty acids produced by said plant. In another aspect of this embodiment, the fatty acids consisting of gamma-linolenic acid (GLA; 18:3, n-6), PUFAs having 18 carbons and four carbon-carbon double bonds, PUFAs having 20 carbons and three carbon-carbon double bonds, and PUFAs having 22 carbons and two or three carbon-carbon double bonds, comprise less than 5% by weight of the total fatty acids produced by said plant. In another aspect of this embodiment, gamma-linolenic acid (GLA; 18:3, n-6) comprises less than 1% by weight of the total fatty acids produced by said plant.

[0016] In one aspect of any of the above-embodiments of the invention, the plant has not been genetically modified to express a desaturase or an elongase enzyme, and particularly, a desaturase or elongase enzyme that is used in a FAS-based, conventional, or standard pathway of PUFA production.

[0017] Another embodiment of the invention relates to a plant or part of a plant, wherein the plant has been genetically modified with a PUFA PKS system from a eukaryote that produces at least one polyunsaturated fatty acid (PUFA), and wherein the total fatty acid profile in the plant or part of the plant comprises a detectable amount of said at least one PUFA. In one aspect of this embodiment, the total fatty acid profile in the plant or part of the plant comprises at least 0.5% by weight of said at least one PUFA. In another aspect of this embodiment, the total fatty acids produced by said PUFA PKS system, other than said at least one PUFA, comprises less than about 10% by weight of the total fatty acids produced by said plant. In another aspect of this embodiment, the total fatty acids produced by said enzymes, other than said at least one PUFA, comprises less than about 5% by weight of the total fatty acids produced by said plant.

[0018] In one aspect of the above-embodiment, the PUFA PKS system comprises: (a) at least one enoyl-ACP reductase (ER) domain; (b) at least four acyl carrier protein (ACP) domains; (c) at least two β-ketoacyl-ACP synthase (KS) domains; (d) at least one acyltransferase (AT) domain; (e) at least one β-ketoacyl-ACP reductase (KR) domain; (f) at least two FabA-like β-hydroxyacyl-ACP dehydrase (DH) domains; (g) at least one chain length factor (CLF) domain; and (h) at least one malonyl-CoA:ACP acyltransferase (MAT) domain.

[0019] In another aspect of the above-embodiment, the PUFA PKS system comprises: (a) two enoyl ACP-reductase (ER) domains; (b) eight or nine acyl carrier protein (ACP) domains; (c) two β-keto acyl-ACP synthase (KS) domains; (d) one acyltransferase (AT) domain; (e) one ketoreductase (KR) domain; (f) two FabA-like β-hydroxy acyl-ACP dehydrase (DH) domains; (g) one chain length factor (CLF) domain; and (h) one malonyl-CoA:ACP acyltransferase (MAT) domain.

[0020] The above-described PUFA PKS system, in one aspect, is from a Thraustochytriales microorganism. In one aspect, the PUFA PKS system is from Schizochytrium. In one aspect, the PUFA PKS system is from Thraustochytrium. In one aspect, the PUFA PKS system is from a microorganism selected from: Schizochytrium sp. American Type Culture Collection (ATCC) No. 20888; Thraustochytrium 23B ATCC No. 20892, and a mutant of any of said microorganisms. In one aspect, the nucleic acid sequences encoding the PUFA PKS system hybridize under stringent hybridization conditions to the genes encoding the PUFA PKS system from a microorganism selected from: Schizochytrium sp. American Type Culture Collection (ATCC) No. 20888; Thraustochytrium 23B ATCC No. 20892; and a mutant of any of said microorganisms. In one aspect, the nucleic acid sequences encoding the PUFA PKS system hybridize under stringent hybridization conditions to the genes encoding the PUFA PKS system from Schizochytrium sp. American Type Culture Collection (ATCC) No. 20888 or a mutant thereof. In one aspect, the PUFA PKS system comprises at least one domain from a PUFA PKS system from a Thraustochytriales microorganism. In another aspect, the PUFA PKS system includes any one or more nucleic acid sequences or amino acid sequences selected from: SEQ ID NOs:1-32 or 38-68.

[0021] In any of the above embodiments, in one aspect, the PUFA PKS system further comprises a phosphopantetheinyl transferase (PPTase).

[0022] Yet another embodiment of the invention relates to a plant or part of a plant, wherein the plant has been genetically modified with a PUFA PKS system that produces at least one polyunsaturated fatty acid (PUFA), and wherein the total fatty acid profile in the plant or part of the plant comprises a detectable amount of said at least one PUFA, wherein the PUFA PKS system is a bacterial PUFA PKS system that produces PUFAs at temperatures of at least about 25° C., and wherein the bacterial PUFA PKS system comprises: (a) at least one enoyl ACP-reductase (ER) domain; (b) at least six acyl carrier protein (ACP) domains; (c) at least two β-keto acyl-ACP synthase (KS) domains; (d) at least one acyltransferase (AT) domain; (e) at least one ketoreductase (KR) domain; (f) at least two FabA-like β-hydroxy acyl-ACP dehydrase (DH) domains; (g) at least one chain length factor (CLF) domain; (h) at least one malonyl-CoA:ACP acyltransferase (MAT) domain; and (i) at least one 4′-phosphopantetheinyl transferase (PPTase) domain. In one aspect of this embodiment, the PUFA PKS system is from a microorganism selected from: Shewanella olleyana Australian Collection of Antarctic Microorganisms (ACAM) strain number 644; Shewanella japonica ATCC strain number BAA-316, and a mutant of any of said microorganisms. In one aspect, the nucleic acid sequences encoding the PUFA PKS system hybridize under stringent hybridization conditions to the genes encoding the PUFA PKS system from a microorganism selected from: Shewanella olleyana Australian Collection of Antarctic Microorganisms (ACAM) strain number 644; or Shewanella japonica ATCC strain number BAA-316, or a mutant of any of said microorganisms. In another aspect, the PUFA PKS system includes any one or more nucleic acid sequences or amino acid sequence selected from: SEQ ID NOs:69-80.

[0023] Another embodiment of the invention relates to an oilseed plant, or part of the oilseed plant, that produces mature seeds in which the total seed fatty acid profile comprises at least 1.0% by weight of at least one polyunsaturated fatty acid having at least twenty carbon atoms and at least four carbon-carbon double bonds, and wherein the total fatty acid profile in the plant or part of the plant contains less than 5% in total of all of the following PUFAs: gamma-linolenic acid (GLA; 18:3, n-6), PUFAs having 18 carbons and four carbon-carbon double bonds, PUFAs having 20 carbons and three carbon-carbon double bonds, and PUFAs having 22 carbons and two or three carbon-carbon double bonds.

[0024] Another embodiment of the invention relates to an oilseed plant, or part of the oilseed plant, that produces mature seeds in which the total seed fatty acid profile comprises at least 1.0% by weight of at least one polyunsaturated fatty acid having at least twenty carbon atoms and at least four carbon-carbon double bonds, and wherein the total fatty acid profile in the plant or part of the plant contains less than 1% of gamma-linolenic acid (GLA; 18:3, n-6).

[0025] In any of the above-described embodiments of the invention, in one aspect, the at least one PUFA has at least twenty carbons and five or more carbon-carbon double bonds. In another aspect, the at least one PUFA is selected from: DHA (docosahexaenoic acid (C22:6, n-3)), ARA (eicosatetraenoic acid or arachidonic acid (C20:4, n-6)), DPA (docosapentaenoic acid (C22:5, n-6 or n-3)), and EPA (eicosapentaenoic acid (C20:5, n-3). In another aspect, the at least one PUFA is selected from: DHA (docosahexaenoic acid (C22:6, n-3)), DPA (docosapentaenoic acid (C22:5, n-6 or n-3)), and EPA (eicosapentaenoic acid (C20:5, n-3). In another aspect, the at least one PUFA is selected from: DHA (docosahexaenoic acid (C22:6, n-3)), ARA (eicosatetraenoic acid or arachidonic acid (C20:4, n-6)), DPA (docosapentaenoic acid (C22:5, n-6 or n-3)), EPA (eicosapentaenoic acid (C20:5, n-3), gamma-linolenic acid (GLA; 18:3, n-6); stearidonic acid (STA or SDA; 18:4, n-3); and dihomo-gamma-linolenic acid (DGLA or HGLA; 20:3, n-6). In another aspect, the at least one PUFA is DHA. In another aspect, when the target PUFA is DHA, the ratio of EPA:DHA produced by the plant is less than 1:1. In another aspect, the at least one PUFA is EPA. In another aspect, the at least one PUFA is DHA and DPAn-6. In another aspect, the at least one PUFA is EPA and DHA. In another aspect, the at least one PUFA is ARA and DHA. In another aspect, the at least one PUFA is ARA and EPA.

[0026] In one aspect of any of the above-described embodiments of the invention, the plant is an oilseed plant and wherein the part of the plant is a mature oilseed. In one aspect, the plant is a crop plant. In another aspect, the plant is a dicotyledonous plant. In another aspect, the plant is a monocotyledonous plant. In another aspect, the plant is selected from: canola, soybean, rapeseed, linseed, corn, safflower, sunflower and tobacco.

[0027] Yet another embodiment of the invention relates to plant or a part of the plant, wherein the total fatty acid profile in the plant or part of the plant comprises detectable amounts of DHA (docosahexaenoic acid (C22:6, n-3)), and DPA (docosapentaenoic acid (C22:5, n-6), wherein the ratio of DPAn-6 to DHA is 1:1 or greater than 1:1. In one aspect of this embodiment, the total fatty acid profile in the plant or part of the plant contains less than 5% by weight in total of all of the following PUFAs: gamma-linolenic acid (GLA; 18:3, n-6), PUFAs having 18 carbons and four carbon-carbon double bonds, PUFAs having 20 carbons and three carbon-carbon double bonds, and PUFAs having 22 carbons and two or three carbon-carbon double bonds.

[0028] Another embodiment of the invention relates to plant or part of a plant, wherein the plant has been genetically modified with a PUFA PKS system that produces at least one polyunsaturated fatty acid (PUFA), and wherein the total fatty acid profile in the plant or part of the plant comprises a detectable amount of said at least one PUFA, wherein the PUFA PKS system comprises: (a) two enoyl ACP-reductase (ER) domains; (b) eight or nine acyl carrier protein (ACP) domains; (c) two β-keto acyl-ACP synthase (KS) domains; (d) one acyltransferase (AT) domain; (e) one ketoreductase (KR) domain; (f) two FabA-like β-hydroxy acyl-ACP dehydrase (DH) domains; (g) one chain length factor (CLF) domain; (h) one malonyl-CoA:ACP acyltransferase (MAT) domain; and (i) one phosphopantetheinyl transferase (PPTase).

[0029] Another embodiment of the invention relates to seeds obtained from any of the above-identified plants or part of plants. Yet another embodiment of the invention relates to a food product comprising such seeds.

[0030] Yet another embodiment of the invention relates to an oil obtained from seeds of any of the above-described plants.

[0031] Another embodiment of the invention includes an oil comprising the fatty acid profile shown in FIG. 2 or FIG. 3.

[0032] Another embodiment of the invention includes an oil blend comprising any of the oils produced by the plants described herein and another oil. In one aspect, the another oil is a microbial oil, and in another aspect, the another oil is a fish oil.

[0033] Yet another embodiment of the invention relates to an oil comprising the following fatty acids: DHA (C22:6n-3), DPAn-6 (C22:5n-6), oleic acid (C18:1), linolenic acid (C18:3), linoleic acid (C18:2), C16:0, C18.0, C20:0, C20:1n-9, C20:2n-6, C22:1n-9; wherein the oil comprises less than 0.5% of any of the following fatty acids: gamma-linolenic acid (GLA; 18:3, n-6), PUFAs having 18 carbons and four carbon-carbon double bonds, PUFAs having 20 carbons and three carbon-carbon double bonds, and PUFAs having 22 carbons and two or three carbon-carbon double bonds.

[0034] Another embodiment of the invention relates to a plant oil comprising at least about 0.5% by weight of at least one polyunsaturated fatty acid (PUFA) having at least twenty carbons and four or more carbon-carbon double bonds, and wherein the total fatty acid profile oil contains less than 5% in total of all of the following PUFAs: gamma-linolenic acid (GLA; 18:3, n-6), PUFAs having 18 carbons and four carbon-carbon double bonds, PUFAs having 20 carbons and three carbon-carbon double bonds, and PUFAs having 22 carbons and two or three carbon-carbon double bonds.

[0035] Another embodiment of the invention relates to a plant oil comprising detectable amounts of DHA (docosahexaenoic acid (C22:6, n-3)), and DPA (docosapentaenoic acid (C22:5, n-6), wherein the ratio of DPAn-6 to DHA is 1:1 or greater than 1:1.

[0036] Yet another embodiment of the invention relates to a food product that contains any of the above-described oils. In one embodiment, the food product further includes any of the seeds described above.

[0037] Another embodiment of the invention relates to a pharmaceutical product that contains any of the above-described oils.

[0038] Another embodiment of the invention relates to a method to produce an oil comprising at least one PUFA, comprising recovering an oil from any of the seeds described above.

[0039] Yet another embodiment of the invention relates to a method to produce an oil comprising at least one PUFA, comprising recovering an oil from any of the above-described plants or part of the plants.

[0040] Another embodiment of the invention relates to a method to provide a supplement or therapeutic product comprising at least one PUFA to an individual, comprising providing to the individual any of the above-described plants or part of plants, any of the above-described seeds, any of the above-described oils, any of the above-described food products, and/or any of the above-described pharmaceutical products.

### BRIEF DESCRIPTION OF THE DRAWINGS OF THE INVENTION

[0041] FIG. 1 is a FAME profile of control yeast and yeast expressing Schizochytrium Orfs sA, sB, C and Het I.

[0042] FIG. 2 is the FAME profile for yeast from FIG. 1, expanded to illustrate the production of target PUFAs.

[0043] FIG. 3 is the FAME profile of wild-type Arabidopsis and Arabidopsis Line 263 (Plastid targeted) expressing Schizochytrium Orfs A, B*, C and Het I.

### DETAILED DESCRIPTION OF THE INVENTION

[0044] The present invention generally relates to a method to produce PUFAs in an oil-seed plant that has been genetically modified to express a PUFA PKS system, and the oil seeds, oils, and products comprising such oils produced by this system. The oils produced by the plant contain at least one PUFA produced by the PUFA PKS system and are free of the mixed shorter-chain and less unsaturated PUFAs that are fatty acid products produced by the modification of products of the FAS system.

[0045] The basic domain structures and sequence characteristics of the PUFA synthase (i.e., PUFA PKS system) family of enzymes have been described (see Background section and below). It has been demonstrated that PUFA synthase enzymes are capable of de novo synthesis of various PUFAs (e.g., EPA, DHA and DPA n-6) and that those products can accumulate in a host organism's phospholipids (PL) and in some cases, in the neutral lipids (e.g., triacylglycerols—TAG). In addition, the use of these PUFA synthase systems to genetically modify host organisms, including plants, has been described. Data provided herein show the production of PUFAs in a plant that has been genetically modified to express the genes encoding a PUFA PKS system from Schizochytrium and a PUFA PKS accessory enzyme, 4′-phosphopantetheinyl transferase (PPTase). The oils produced by these plants contain significant quantities of both DHA (docosahexaenoic acid (C22:6, n-3)) and DPA (docosapentaenoic acid (C22:5, n-6), which are the predominant PUFAs (the primary PUFAs) produced by the Schizochytrium from which the PUFA PKS genes were derived. Significantly, the inventor shows herein that the oils from plants that produce PUFAs using the PUFA PKS pathway have a different fatty acid profile than plants that are genetically engineered to produce the same PUFAs by the “standard” pathway described above. In particular, oils from plants that have been genetically engineered to produce specific PUFAs by the PUFA PKS pathway are substantially free of the various intermediate products and side products that accumulate in oils that are produced as a result of the use of the standard PUFA synthesis pathway. This characteristic is discussed in detail below.

[0046] More particularly, efforts to produce long chain PUFAs in plants by the “standard” pathway have all taken the same basic approach, which is dictated by this synthesis pathway. These efforts relied on modification of the plants' endogenous fatty acids by introduction of genes encoding various elongases and desaturases. Plants typically produce 18 carbon fatty acids (e.g., oleic acid, linoleic acid, linolenic acid) via the Type II fatty acid synthase (FAS) in its plastids. Often, a single double bond is formed while that fatty acid is attached to ACP, and then the oleic acid (18:1) is cleaved from the ACP by the action of an acyl-ACP thioesterase. The free fatty acid is exported from the plastid and converted to an acyl-CoA. The 18:1 can be esterified to phosphatidylcholine (PC) and up to two more cis double bonds can be added. The newly introduced elongases can utilize substrates in the acyl-CoA pool to add carbons in two-carbon increments. Newly introduced desaturases can utilize either fatty acids esterified to PC, or those in the acyl-CoA pool, depending on the source of the enzyme. One consequence of this scheme for long chain PUFA production, however, is that intermediates or side products in the pathway accumulate, which often represent the majority of the novel fatty acids in the plant oil, rather than the target long chain PUFA.

[0047] For example, using the standard or classical pathway as described above, when the target PUFA product (i.e., the PUFA product that one is targeting for production, trying to produce, or attempting to produce, by using the standard pathway) is DHA or EPA (e.g., produced using elongases and desaturases that will produce the DHA or EPA from the products of the FAS system), a variety of intermediate products and side products will be produced in addition to the DHA or EPA, and these intermediate or side products frequently represent the majority of the products produced by the pathway, or are at least present in significant amounts in the lipids of the production organism. Such intermediate and side products include, but are not limited to, fatty acids having fewer carbons and/or fewer double bonds than the target, or primary PUFA, and can include unusual fatty acid side products that may have the same number of carbons as the target or primary PUFA, but which may have double bonds in unusual positions. This result is illustrated in an example of the production of EPA using the standard pathway (e.g., see U.S. Patent Application Publication 2004/0172682). Specifically, while the target PUFA of the pathway is EPA (i.e., due to the use of particular elongases and desaturases that specifically act on the products of the FAS system to produce EPA), the oils produced by the system include a variety of intermediate and side products including: gamma-linolenic acid (GLA; 18:3, n-6); stearidonic acid (STA or SDA; 18:4, n-3); dihomo-gamma-linolenic acid (DGLA or HGLA; 20:3, n-6), arachidonic acid (ARA, C20:4, n-6); eicosatrienoic acid (ETA; 20:3, n-9) and various other intermediate or side products, such as 20:0; 20:1 (Δ5); 20:1 (Δ11); 20:2 (Δ8,11); 20:2 (Δ11,14); 20:3 (Δ5,11,14); 20:3 (Δ11,14,17); mead acid (20:3; Δ5,8,11); or 20:4 (Δ5,1,14,17). Intermediates of the system can also include long chain PUFAs that are not the target of the genetic modification (e.g., a standard pathway enzyme system for producing DHA can actually produce more EPA as an intermediate product than DHA, as illustrated, for example, in U.S. Patent Application Publication 2004/0172682, see additional discussion of this point below).

[0048] In contrast, the PUFA PKS synthase of the present invention does not utilize the fatty acid products of FAS systems. Instead, it produces the final PUFA product (the primary PUFA product) from the same small precursor molecule that is utilized by FASs and elongases (malonyl-CoA). Therefore, intermediates in the synthesis cycle are not released in any significant amount, and the PUFA product (also referred to herein as the primary PUFA product) is efficiently transferred to phospholipids (PL) and triacylglycerol (TAG) fractions of the lipids. Indeed, a PUFA PKS system may produce two target or primary PUFA products (e.g., the PUFA PKS system from Schizochytrium produces both DHA and DPA n-6 as primary products), but DPA is not an intermediate in the pathway to produce DHA. Rather, each is a separate product of the same PUFA PKS system. Therefore, PUFA PKS genes are an excellent means of producing oils containing PUFAs, and particularly, long chain PUFAs (LCPUFAs) in a heterologous host, such as a plant, wherein the oils are substantially free (defined below) of the intermediates and side products that contaminate oils produced by the “standard” PUFA pathway (also defined below).

[0049] Therefore, it is an object of the present invention to produce, via the genetic manipulation of plants as described herein, polyunsaturated fatty acids of desired chain length and with desired numbers of double bonds and, by extension, oil seed and oils obtained from such plants (i.e., obtained from the oil seeds of such plants) comprising these PUFAs. Examples of PUFAs that can be produced by the present invention include, but are not limited to, DHA (docosahexaenoic acid (C22:6, n-3)), ARA (eicosatetraenoic acid or arachidonic acid (C20:4, n-6)), DPA (docosapentaenoic acid (C22:5, n-6 or n-3)), and EPA (eicosapentaenoic acid (C20:5, n-3)). The present invention allows for the production of commercially valuable lipids enriched in one or more desired (target or primary) PUFAs by the present inventors' development of genetically modified plants through the use of the polyketide synthase-like system that produces PUFAs.

[0050] According to the present invention, reference to a “primary PUFA”, “target PUFA”, “intended PUFA”, or “desired PUFA” refers to the particular PUFA or PUFAs that are the intended or targeted product of the enzyme pathway that is used to produce the PUFA(s). For example, when using elongases and desaturates to modify products of the FAS system, one can select particular combinations of elongases and desaturases that, when used together, will produce a target or desired PUFA (e.g., DHA or EPA). As discussed above, such target or desired PUFA produced by the standard pathway may not actually be a “primary” PUFA in terms of the amount of PUFA as a percentage of total fatty acids produced by the system, due to the formation of intermediates and side products that can actually represent the majority of products produced by the system. However, one may use the term “primary PUFA” even in that instance to refer to the target or intended PUFA product produced by the elongases or desaturases used in the system.

[0051] When using a PUFA PKS system as preferred in the present invention, a given PUFA PKS system derived from a particular organism will produce particular PUFA(s), such that selection of a PUFA PKS system from a particular organism will result in the production of specified target or primary PUFAs. For example, use of a PUFA PKS system from Schizochytrium will result in the production of DHA and DPAn-6 as the target or primary PUFAs. Use of a PUFA PKS system from various Shewanella species, on the other hand, will result in the production of EPA as the target or primary PUFA. It is noted that the ratio of the primary or target PUFAs can differ depending on the selection of the particular PUFA PKS system and on how that system responds to the specific conditions in which it is expressed. For example, use of a PUFA PKS system from Thraustochytrium 23B (ATCC No. 20892) will also result in the production of DHA and DPAn-6 as the target or primary PUFAs; however, in the case of Thraustochytrium 23B, the ratio of DHA to DPAn-6 is about 10:1 (and can range from about 8:1 to about 40:1), whereas in Schizochytrium, the ratio is typically about 2.5:1. Therefore, use of a Thraustochytrium PUFA PKS system or proteins or domains can alter the ratio of PUFAs produced by an organism as compared to Schizochytrium even though the target PUFAs are the same. In addition, as discussed below, one can also modify a given PUFA PKS system by intermixing proteins and domains from different PUFA PKS systems or PUFA PKS and PKS systems, or one can modify a domain or protein of a given PUFA PKS system to change the target PUFA product and/or ratios.

[0052] According to the present invention, reference to “intermediate products” or “side products” of an enzyme system that produces PUFAs refers to any products, and particularly, fatty acid products, that are produced by the enzyme system as a result of the production of the target or primary PUFA(s) of the system, but which are not the primary or target PUFA(s). In one embodiment, intermediate and side products may include non-target fatty acids that are naturally produced by the wild-type plant, or by the parent plant used as a recipient for the indicated genetic modification, but are now classified as intermediate or side products because they are produced in greater levels as a result of the genetic modification, as compared to the levels produced by the wild-type plant, or by the parent plant used as a recipient for the indicated genetic modification. Intermediate and side products are particularly significant in the standard pathway for PUFA synthesis and are substantially less significant in the PUFA PKS pathway, as discussed above. It is noted that a primary or target PUFA of one enzyme system may be an intermediate of a different enzyme system where the primary or target product is a different PUFA, and this is particularly true of products of the standard pathway of PUFA production, since the PUFA PKS system substantially avoids the production of intermediates. For example, when using the standard pathway to produce EPA, fatty acids such as GLA, DGLA and SDA are produced as intermediate products in significant quantities (e.g., U.S. Patent Application Publication 2004/0172682 illustrates this point). Similarly, and also illustrated by U.S. Patent Application Publication 2004/0172682, when using the standard pathway to produce DHA, in addition to the fatty acids mentioned above, ETA and EPA (notably the target PUFA in the first example above) are produced in significant quantities and in fact, may be present in significantly greater quantities relative to the total fatty acid product than the target PUFA itself. This latter point is also shown in U.S. Patent Application Publication 2004/0172682, where a plant that was engineered to produce DHA by the standard pathway produces more EPA as a percentage of total fatty acids than the targeted DHA.

[0053] As used herein, a PUFA PKS system (which may also be referred to as a PUFA synthase system or PUFA synthase) generally has the following identifying features: (1) it produces PUFAs, and particularly, long chain PUFAs, as a natural product of the system; and (2) it comprises several multifunctional proteins assembled into a complex that conducts both iterative processing of the fatty acid chain as well non-iterative processing, including trans-cis isomerization and enoyl reduction reactions in selected cycles. In addition, the ACP domains present in the PUFA synthase enzymes require activation by attachment of a cofactor (4-phosphopantetheine). Attachment of this cofactor is carried out by phosphopantetheinyl transferases (PPTase). If the endogenous PPTases of the host organism are incapable of activating the PUFA synthase ACP domains, then it is necessary to provide a PPTase that is capable of carrying out that function. The inventors have identified the Het I enzyme of Nostoc sp. as an exemplary and suitable PPTase for activating PUFA synthase ACP domains. Reference to a PUFA PKS system or a PUFA synthase refers collectively to all of the genes and their encoded products that work in a complex to produce PUFAs in an organism. Therefore, the PUFA PKS system refers specifically to a PKS system for which the natural products are PUFAs.

[0054] More specifically, a PUFA PKS system as referenced herein produces polyunsaturated fatty acids (PUFAs) and particularly, long chain PUFAs (LCPUFAs), as products. For example, an organism that endogenously (naturally) contains a PUFA PKS system makes PUFAs using this system. According to the present invention, PUFAs are fatty acids with a carbon chain length of at least 16 carbons, and more preferably at least 18 carbons, and more preferably at least 20 carbons, and more preferably 22 or more carbons, with at least 3 or more double bonds, and preferably 4 or more, and more preferably 5 or more, and even more preferably 6 or more double bonds, wherein all double bonds are in the cis configuration. Reference to long chain polyunsaturated fatty acids (LCPUFAs) herein more particularly refers to fatty acids of 18 and more carbon chain length, and preferably 20 and more carbon chain length, containing 3 or more double bonds. LCPUFAs of the omega-6 series include: gamma-linolenic acid (C18:3), di-homo-gamma-linolenic acid (C20:3n-6), arachidonic acid (C20:4n-6), adrenic acid (also called docosatetraenoic acid or DTA) (C22:4n-6), and docosapentaenoic acid (C22:5n-6). The LCPUFAs of the omega-3 series include: alpha-linolenic acid (C18:3), eicosatrienoic acid (C20:3n-3), eicosatetraenoic acid (C20:4n-3), eicosapentaenoic acid (C20:5n-3), docosapentaenoic acid (C22:5n-3), and docosahexaenoic acid (C22:6n-3). The LCPUFAs also include fatty acids with greater than 22 carbons and 4 or more double bonds including but not limited to C28:8(n-3).

[0055] A PUFA PKS system according to the present invention also comprises several multifunctional proteins (and can include single function proteins, particularly for PUFA PKS systems from marine bacteria) that are assembled into a complex that conducts both iterative processing of the fatty acid chain as well non-iterative processing, including trans-cis isomerization and enoyl reduction reactions in selected cycles. These proteins can also be referred to herein as the core PUFA PKS enzyme complex or the core PUFA PKS system. The general functions of the domains and motifs contained within these proteins are individually known in the art and have been described in detail with regard to various PUFA PKS systems from marine bacteria and eukaryotic organisms (see, e.g., U.S. Pat. No. 6,140,486; U.S. Pat. No. 6,566,583; Metz et al., Science 293:290-293 (2001); U.S. Patent Application Publication No. 20020194641; U.S. Patent Application Publication No. 20040235127; U.S. Patent Application Publication No. 20050100995, and PCT Publication No. WO 2006/135866). The domains may be found as a single protein (i.e., the domain and protein are synonymous) or as one of two or more (multiple) domains in a single protein, as mentioned above.

[0056] The domain architecture of various PUFA PKS systems from marine bacteria and members of Thraustochytrium, and the structural and functional characteristics of genes and proteins comprising such PUFA PKS systems, have been described in detail (see, e.g., U.S. Pat. No. 6,140,486; U.S. Pat. No. 6,566,583; Metz et al., Science 293:290-293 (2001); U.S. Patent Application Publication No. 20020194641; U.S. Patent Application Publication No. 20040235127; U.S. Patent Application Publication No. 20050100995 and PCT Publication No. WO 2006/135866).

[0057] PUFA PKS systems and proteins or domains thereof that are useful in the present invention include both bacterial and non-bacterial PUFA PKS systems. A non-bacterial PUFA PKS system is a PUFA PKS system that is from or derived from an organism that is not a bacterium, such as a eukaryote or an archaebacterium. Eukaryotes are separated from prokaryotes based on the degree of differentiation of the cells, with eukaryotes being more differentiated than prokaryotes. In general, prokaryotes do not possess a nuclear membrane, do not exhibit mitosis during cell division, have only one chromosome, contain 70S ribosomes in their cytoplasm, do not possess mitochondria, endoplasmic reticulum, chloroplasts, lysosomes or Golgi apparatus, and may have flagella, which if present, contain a single fibril. In contrast, eukaryotes have a nuclear membrane, exhibit mitosis during cell division, have many chromosomes, contain 80S ribosomes in their cytoplasm, possess mitochondria, endoplasmic reticulum, chloroplasts (in algae), lysosomes and Golgi apparatus, and may have flagella, which if present, contain many fibrils. In general, bacteria are prokaryotes, while algae, fungi, protist, protozoa and higher plants are eukaryotes. According to the present invention, genetically modified plants can be produced which incorporate non-bacterial PUFA PKS functional domains with bacterial PUFA PKS functional domains, as well as PKS functional domains or proteins from other PKS systems (Type I iterative or modular, Type II, or Type III) or FAS systems.

[0058] Preferably, a PUFA PKS system of the present invention comprises at least the following biologically active domains that are typically contained on three or more proteins: (a) at least one enoyl-ACP reductase (ER) domain; (b) multiple acyl carrier protein (ACP) domain(s) (e.g., at least from one to four, and preferably at least five ACP domains, and in some embodiments up to six, seven, eight, nine, ten, or more than ten ACP domains); (c) at least two β-ketoacyl-ACP synthase (KS) domains; (d) at least one acyltransferase (AT) domain; (e) at least one β-ketoacyl-ACP reductase (KR) domain; (f) at least two FabA-like β-hydroxyacyl-ACP dehydrase (DH) domains; (g) at least one chain length factor (CLF) domain; (h) at least one malonyl-CoA:ACP acyltransferase (MAT) domain. In one embodiment, a PUFA PKS system according to the present invention also comprises at least one region containing a dehydratase (DH) conserved active site motif.

[0059] In a preferred embodiment, a PUFA PKS system comprises at least the following biologically active domains: (a) at least one enoyl-ACP reductase (ER) domain; (b) at least five acyl carrier protein (ACP) domains; (c) at least two β-ketoacyl-ACP synthase (KS) domains; (d) at least one acyltransferase (AT) domain; (e) at least one β-ketoacyl-ACP reductase (KR) domain; (f) at least two FabA-like β-hydroxyacyl-ACP dehydrase (DH) domains; (g) at least one chain length factor (CLF) domain; and (h) at least one malonyl-CoA:ACP acyltransferase (MAT) domain. In one embodiment, a PUFA PKS system according to the present invention also comprises at least one region or domain containing a dehydratase (DH) conserved active site motif that is not a part of a FabA-like DH domain. The structural and functional characteristics of each of these domains are described in detail in U.S. Patent Application Publication No. 20020194641; U.S. Patent Application Publication No. 20040235127; U.S. Patent Application Publication No. 20050100995; and PCT Publication No. WO 2006/135866.

[0060] According to the present invention, a domain or protein having 3-keto acyl-ACP synthase (KS) biological activity (function) is characterized as the enzyme that carries out the initial step of the FAS (and PKS) elongation reaction cycle. The term “β-ketoacyl-ACP synthase” can be used interchangeably with the terms “3-keto acyl-ACP synthase”, “β-keto acyl-ACP synthase”, and “keto-acyl ACP synthase”, and similar derivatives. The acyl group destined for elongation is linked to a cysteine residue at the active site of the enzyme by a thioester bond. In the multi-step reaction, the acyl-enzyme undergoes condensation with malonyl-ACP to form -keto acyl-ACP, CO₂ and free enzyme. The KS plays a key role in the elongation cycle and in many systems has been shown to possess greater substrate specificity than other enzymes of the reaction cycle. For example, E. coli has three distinct KS enzymes—each with its own particular role in the physiology of the organism (Magnuson et al., Microbiol. Rev. 57, 522 (1993)). The two KS domains of the PUFA-PKS systems described in marine bacteria and the thraustochytrids described herein may have distinct roles in the PUFA biosynthetic reaction sequence. As a class of enzymes, KS's have been well characterized. The sequences of many verified KS genes are known, the active site motifs have been identified and the crystal structures of several have been determined. Proteins (or domains of proteins) can be readily identified as belonging to the KS family of enzymes by homology to known KS sequences.

[0061] According to the present invention, a domain or protein having malonyl-CoA:ACP acyltransferase (MAT) biological activity (function) is characterized as one that transfers the malonyl moiety from malonyl-CoA to ACP. The term “malonyl-CoA:ACP acyltransferase” can be used interchangeably with “malonyl acyltransferase” and similar derivatives. In addition to the active site motif (GxSxG), these enzymes possess an extended motif of R and Q amino acids in key positions that identifies them as MAT enzymes (e.g., in contrast to an AT domain described below). In some PKS systems (but not the PUFA PKS domain) MAT domains will preferentially load methyl- or ethyl-malonate on to the ACP group (from the corresponding CoA ester), thereby introducing branches into the linear carbon chain. MAT domains can be recognized by their homology to known MAT sequences and by their extended motif structure.

[0062] According to the present invention, a domain or protein having acyl carrier protein (ACP) biological activity (function) is characterized as being small polypeptides (typically, 80 to 100 amino acids long), that function as carriers for growing fatty acyl chains via a thioester linkage to a covalently bound co-factor of the protein. They occur as separate units or as domains within larger proteins. ACPs are converted from inactive apo-forms to functional holo-forms by transfer of the phosphopantetheinyl moiety of CoA to a highly conserved serine residue of the ACP. Acyl groups are attached to ACP by a thioester linkage at the free terminus of the phosphopantetheinyl moiety. ACPs can be identified by labeling with radioactive pantetheine and by sequence homology to known ACPs. The presence of variations of the above mentioned motif (LGIDS*) is also a signature of an ACP.

[0063] According to the present invention, a domain or protein having ketoreductase activity, also referred to as 3-ketoacyl-ACP reductase (KR) biological activity (function), is characterized as one that catalyzes the pyridine-nucleotide-dependent reduction of 3-keto acyl forms of ACP. It is the first reductive step in the de novo fatty acid biosynthesis elongation cycle and a reaction often performed in polyketide biosynthesis. The term “β-ketoacyl-ACP reductase” can be used interchangeably with the terms “ketoreductase”, “3-ketoacyl-ACP reductase”, “keto-acyl ACP reductase” and similar derivatives of the term. Significant sequence similarity is observed with one family of enoyl ACP reductases (ER), the other reductase of FAS (but not the ER family present in the PUFA PKS systems), and the short-chain alcohol dehydrogenase family. Pfam analysis of the PUFA PKS region indicated above reveals the homology to the short-chain alcohol dehydrogenase family in the core region. Blast analysis of the same region reveals matches in the core area to known KR enzymes as well as an extended region of homology to domains from the other characterized PUFA PKS systems.

[0064] According to the present invention, a domain or protein is referred to as a chain length factor (CLF) based on the following rationale. The CLF was originally described as characteristic of Type II (dissociated enzymes) PKS systems and was hypothesized to play a role in determining the number of elongation cycles, and hence the chain length, of the end product. CLF amino acid sequences show homology to KS domains (and are thought to form heterodimers with a KS protein), but they lack the active site cysteine. CLF's role in PKS systems has been controversial. New evidence (C. Bisang et al., Nature 401, 502 (1999)) suggests a role in priming (providing the initial acyl group to be elongated) the PKS systems. In this role the CLF domain is thought to decarboxylate malonate (as malonyl-ACP), thus forming an acetate group that can be transferred to the KS active site. This acetate therefore acts as the ‘priming’ molecule that can undergo the initial elongation (condensation) reaction. Homologues of the Type II CLF have been identified as ‘loading’ domains in some modular PKS systems. A domain with the sequence features of the CLF is found in all currently identified PUFA PKS systems and in each case is found as part of a multidomain protein.

[0065] An “acyltransferase” or “AT” refers to a general class of enzymes that can carry out a number of distinct acyl transfer reactions. The term “acyltransferase” can be used interchangeably with the term “acyl transferase”. The AT domains identified in the PUFA PKS systems described herein show good homology one another and to domains present in all of the other PUFA PKS systems currently examined and very weak homology to some acyltransferases whose specific functions have been identified (e.g. to malonyl-CoA:ACP acyltransferase, MAT). In spite of the weak homology to MAT, this AT domain is not believed to function as a MAT because it does not possess an extended motif structure characteristic of such enzymes (see MAT domain description, above). For the purposes of this disclosure, the possible functions of the AT domain in a PUFA PKS system include, but are not limited to: transfer of the fatty acyl group from the ORFA ACP domain(s) to water (i.e. a thioesterase—releasing the fatty acyl group as a free fatty acid), transfer of a fatty acyl group to an acceptor such as CoA, transfer of the acyl group among the various ACP domains, or transfer of the fatty acyl group to a lipophilic acceptor molecule (e.g. to lysophosphadic acid).

[0066] According to the present invention, this domain has enoyl reductase (ER) biological activity. The ER enzyme reduces the trans-double bond (introduced by the DH activity) in the fatty acyl-ACP, resulting in fully saturating those carbons. The ER domain in the PUFA-PKS shows homology to a newly characterized family of ER enzymes (Heath et al., Nature 406, 145 (2000)). Heath and Rock identified this new class of ER enzymes by cloning a gene of interest from Streptococcus pneumoniae, purifying a protein expressed from that gene, and showing that it had ER activity in an in vitro assay. All of the PUFA PKS systems currently examined contain at least one domain with very high sequence homology to the Schizochytrium ER domain, which shows homology to the S. pneumoniae ER protein.

[0067] According to the present invention, a protein or domain having dehydrase or dehydratase (DH) activity catalyzes a dehydration reaction. As used generally herein, reference to DH activity typically refers to FabA-like β-hydroxyacyl-ACP dehydrase (DH) biological activity. FabA-like β-hydroxyacyl-ACP dehydrase (DH) biological activity removes HOH from a β-ketoacyl-ACP and initially produces a trans double bond in the carbon chain. The term “FabA-like β-hydroxyacyl-ACP dehydrase” can be used interchangeably with the terms “FabA-like β-hydroxy acyl-ACP dehydrase”, “β-hydroxyacyl-ACP dehydrase”, “dehydrase” and similar derivatives. The DH domains of the PUFA PKS systems show homology to bacterial DH enzymes associated with their FAS systems (rather than to the DH domains of other PKS systems). A subset of bacterial DH's, the FabA-like DH's, possesses cis-trans isomerase activity (Heath et al., J. Biol. Chem., 271, 27795 (1996)). It is the homology to the FabA-like DH proteins that indicate that one or all of the DH domains described herein is responsible for insertion of the cis double bonds in the PUFA PKS products.

[0068] A PUFA PKS protein useful of the invention may also have dehydratase activity that is not characterized as FabA-like (e.g., the cis-trans activity described above is associated with FabA-like activity), generally referred to herein as non-FabA-like DH activity, or non-FabA-like β-hydroxyacyl-ACP dehydrase (DH) biological activity. More specifically, a conserved active site motif (˜13 amino acids long: L*xxHxxxGxxxxP; e.g., illustrated by amino acids 2504-2516 of SEQ ID NO:70; *in the motif, L can also be I) is found in dehydratase domains in PKS systems (Donadio S, Katz L. Gene. 1992 Feb. 1; 111(1):51-60). This conserved motif, also referred to herein as a dehydratase (DH) conserved active site motif or DH motif, is found in a similar region of all known PUFA-PKS sequences described to date and in the PUFA PKS sequences described herein, but it is believed that his motif has only recently been detected. This conserved motif is within an uncharacterized region of high homology in the PUFA-PKS sequence. The proposed biosynthesis of PUFAs via the PUFA-PKS requires a non-FabA like dehydration, and this motif may be responsible for the reaction.

[0069] For purposes of illustration, the structure of several PUFA PKS systems is described in detail below. However, it is to be understood that this invention is not limited to the use of these PUFA PKS systems.

Schizochytrium PUFA PKS System

[0070] In one embodiment, a PUFA PKS system from Schizochytrium comprises at least the following biologically active domains: (a) two enoyl-ACP reductase (ER) domain; (b) between five and ten or more acyl carrier protein (ACP) domains, and in one aspect, nine ACP domains; (c) two β-ketoacyl-ACP synthase (KS) domains; (d) one acyltransferase (AT) domain; (e) one β-ketoacyl-ACP reductase (KR) domain; (f) two FabA-like β-hydroxyacyl-ACP dehydrase (DH) domains; (g) one chain length factor (CLF) domain; and (h) one malonyl-CoA:ACP acyltransferase (MAT) domain. In one embodiment, a Schizochytrium PUFA PKS system according to the present invention also comprises at least one region or domain containing a dehydratase (DH) conserved active site motif that is not a part of a FabA-like DH domain. The structural and functional characteristics of these domains are generally individually known in the art (see, e.g., U.S. Pat. No. 6,566,583; Metz et al., Science 293:290-293 (2001); U.S. Patent Application Publication No. 20020194641; and PCT Publication No. WO 2006/135866).

[0071] There are three open reading frames that form the core Schizochytrium PUFA PKS system described previously. The domain structure of each open reading frame is as follows.

Schizochytrium Open Reading Frame A (OrfA):

[0072] The complete nucleotide sequence for OrfA is represented herein as SEQ ID NO:1. OrfA is a 8730 nucleotide sequence (not including the stop codon) which encodes a 2910 amino acid sequence, represented herein as SEQ ID NO:2. Within OrfA are twelve domains: (a) one β-keto acyl-ACP synthase (KS) domain; (b) one malonyl-CoA:ACP acyltransferase (MAT) domain; (c) nine acyl carrier protein (ACP) domains; and (d) one ketoreductase (KR) domain. Genomic DNA clones (plasmids) encoding OrfA from both Schizochytrium sp. ATCC 20888 and a daughter strain of ATCC 20888, denoted Schizochytrium sp., strain N230D, have been isolated and sequenced.

[0073] A genomic clone described herein as JK1126, isolated from Schizochytrium sp. ATCC 20888, comprises, to the best of the present inventors' knowledge, the nucleotide sequence spanning from position 1 to 8730 of SEQ ID NO:1, and encodes the corresponding amino acid sequence of SEQ ID NO:2. Genomic clone pJK1126 (denoted pJK1126 OrfA genomic clone, in the form of an E. coli plasmid vector containing “OrfA” gene from Schizochytrium ATCC 20888) was deposited with the American Type Culture Collection (ATCC), 10801 University Boulevard, Manassas, Va. 20110-2209 USA on Jun. 8, 2006, and assigned ATCC Accession No. PTA-7648. The nucleotide sequence of pJK1126 OrfA genomic clone, and the amino acid sequence encoded by this plasmid are encompassed by the present invention.

[0074] Two genomic clones described herein as pJK306 OrfA genomic clone and pJK320 OrfA genomic clone, isolated from Schizochytrium sp. N230D, together (overlapping clones) comprise, to the best of the present inventors' knowledge, the nucleotide sequence of SEQ ID NO:1, and encode the amino acid sequence of SEQ ID NO:2. Genomic clone pJK306 (denoted pJK306 OrfA genomic clone, in the form of an E. coli plasmid containing 5′ portion of OrfA gene from Schizochytrium sp. N230D (2.2 kB overlap with pJK320)) was deposited with the American Type Culture Collection (ATCC), 10801 University Boulevard, Manassas, Va. 20110-2209 USA on Jun. 8, 2006, and assigned ATCC Accession No. PTA-7641. The nucleotide sequence of pJK306 OrfA genomic clone, and the amino acid sequence encoded by this plasmid are encompassed by the present invention. Genomic clone pJK320 (denoted pJK320 OrfA genomic clone, in the form of an E. coli plasmid containing 3′ portion of OrfA gene from Schizochytrium sp. N230D (2.2 kB overlap with pJK306)) was deposited with the American Type Culture Collection (ATCC), 10801 University Boulevard, Manassas, Va. 20110-2209 USA on Jun. 8, 2006, and assigned ATCC Accession No. PTA-7644. The nucleotide sequence of pJK320 OrfA genomic clone, and the amino acid sequence encoded by this plasmid are encompassed by the present invention.

[0075] The first domain in OrfA is a KS domain, also referred to herein as ORFA-KS, and the nucleotide sequence containing the sequence encoding the ORFA-KS domain is represented herein as SEQ ID NO:7 (positions 1-1500 of SEQ ID NO:1). The amino acid sequence containing the ORFA-KS domain is represented herein as SEQ ID NO:8 (positions 1-500 of SEQ ID NO:2). It is noted that the ORFA-KS domain contains an active site motif: DXAC* (*acyl binding site C₂₁₅). Also, a characteristic motif at the end of the Schizochytrium KS region, GFGG, is present in this domain in SEQ ID NO:2 and accordingly, in SEQ ID NO:8.

[0076] The second domain in OrfA is a MAT domain, also referred to herein as ORFA-MAT, and the nucleotide sequence containing the sequence encoding the ORFA-MAT domain is represented herein as SEQ ID NO:9 (positions 1723-3000 of SEQ ID NO:1). The amino acid sequence containing the ORFA-MAT domain is represented herein as SEQ ID NO:10 (positions 575-1000 of SEQ ID NO:2). The MAT domain comprises an aspartate at position 93 and a histidine at position 94 (corresponding to positions 667 and 668, respectively, of SEQ ID NO:2). It is noted that the ORFA-MAT domain contains an active site motif: GHS*XG (*acyl binding site S₇₀₆), represented herein as SEQ ID NO:11.

[0077] Domains 3-11 of OrfA are nine tandem ACP domains, also referred to herein as ORFA-ACP (the first domain in the sequence is ORFA-ACP1, the second domain is ORFA-ACP2, the third domain is ORFA-ACP3, etc.). The first ACP domain, ORFA-ACP1, is contained within the nucleotide sequence spanning from about position 3343 to about position 3600 of SEQ ID NO:1 (OrfA). The nucleotide sequence containing the sequence encoding the ORFA-ACP1 domain is represented herein as SEQ ID NO:12 (positions 3343-3600 of SEQ ID NO:1). The amino acid sequence containing the first ACP domain spans from about position 1115 to about position 1200 of SEQ ID NO:2. The amino acid sequence containing the ORFA-ACP1 domain is represented herein as SEQ ID NO:13 (positions 1115-1200 of SEQ ID NO:2). It is noted that the ORFA-ACP1 domain contains an active site motif: LGIDS* (*pantetheine binding motif S₁₁₅₇), represented herein by SEQ ID NO:14.

[0078] The nucleotide and amino acid sequences of all nine ACP domains are highly conserved and therefore, the sequence for each domain is not represented herein by an individual sequence identifier. However, based on the information disclosed herein, one of skill in the art can readily determine the sequence containing each of the other eight ACP domains. All nine ACP domains together span a region of OrfA of from about position 3283 to about position 6288 of SEQ ID NO:1, which corresponds to amino acid positions of from about 1095 to about 2096 of SEQ ID NO:2. The nucleotide sequence for the entire ACP region containing all nine domains is represented herein as SEQ ID NO:16. The region represented by SEQ ID NO:16 includes the linker segments between individual ACP domains. The repeat interval for the nine domains is approximately every 330 nucleotides of SEQ ID NO:16 (the actual number of amino acids measured between adjacent active site serines ranges from 104 to 116 amino acids). Each of the nine ACP domains contains a pantetheine binding motif LGIDS* (represented herein by SEQ ID NO:14), wherein S is the pantetheine binding site serine (S). The pantetheine binding site serine (S) is located near the center of each ACP domain sequence. At each end of the ACP domain region and between each ACP domain is a region that is highly enriched for proline (P) and alanine (A), which is believed to be a linker region. For example, between ACP domains 1 and 2 is the sequence: APAPVKAAAPAAPVASAPAPA, represented herein as SEQ ID NO:15. The locations of the active site serine residues (i.e., the pantetheine binding site) for each of the nine ACP domains, with respect to the amino acid sequence of SEQ ID NO:2, are as follows: ACP1=S₁₁₅₇; ACP2=S₁₂₆₆; ACP3=S₁₃₇₇; ACP4=S₁₄₈₈; ACP5=S₁₆₀₄; ACP6=S₁₇₁₅; ACP7=S₁₈₁₉; ACP8=S₁₉₃₀; and ACP9=S₂₀₃₄. Given that the average size of an ACP domain is about 85 amino acids, excluding the linker, and about 110 amino acids including the linker, with the active site serine being approximately in the center of the domain, one of skill in the art can readily determine the positions of each of the nine ACP domains in OrfA.

[0079] Domain 12 in OrfA is a KR domain, also referred to herein as ORFA-KR, and the nucleotide sequence containing the sequence encoding the ORFA-KR domain is represented herein as SEQ ID NO:17 (positions 6598-8730 of SEQ ID NO:1). The amino acid sequence containing the ORFA-KR domain is represented herein as SEQ ID NO:18 (positions 2200-2910 of SEQ ID NO:2). Within the KR domain is a core region with homology to short chain aldehyde-dehydrogenases (KR is a member of this family). This core region spans from about position 7198 to about position 7500 of SEQ ID NO:1, which corresponds to amino acid positions 2400-2500 of SEQ ID NO:2.

Schizochytrium Open Reading Frame B (OrfB):

[0080] The complete nucleotide sequence for OrfB is represented herein as SEQ ID NO:3. OrfB is a 6177 nucleotide sequence (not including the stop codon) which encodes a 2059 amino acid sequence, represented herein as SEQ ID NO:4. Within OrfB are four domains: (a) one_{.} -keto acyl-ACP synthase (KS) domain; (b) one chain length factor (CLF) domain; (c) one acyl transferase (AT) domain; and, (d) one enoyl ACP-reductase (ER) domain.

[0081] Genomic DNA clones (plasmids) encoding OrfB from both Schizochytrium sp. ATCC 20888 and a daughter strain of ATCC 20888, denoted Schizochytrium sp., strain N230D, have been isolated and sequenced.

[0082] A genomic clone described herein as pJK1129, isolated from Schizochytrium sp. ATCC 20888, comprises, to the best of the present inventors' knowledge, the nucleotide sequence of SEQ ID NO:3, and encodes the amino acid sequence of SEQ ID NO:4. Genomic clone pJK1129 (denoted pJK1129 OrfB genomic clone, in the form of an E. coli plasmid vector containing “OrfB” gene from Schizochytrium ATCC 20888) was deposited with the American Type Culture Collection (ATCC), 10801 University Boulevard, Manassas, Va. 20110-2209 USA on Jun. 8, 2006, and assigned ATCC Accession No. PTA-7649. The nucleotide sequence of pJK1126 OrfB genomic clone, and the amino acid sequence encoded by this plasmid are encompassed by the present invention.

[0083] A genomic clone described herein as pJK324 OrfB genomic clone, isolated from Schizochytrium sp. N230D, comprises, to the best of the present inventors' knowledge, the nucleotide sequence of SEQ ID NO:3, and encodes the amino acid sequence of SEQ ID NO:4. Genomic clone pJK324 (denoted pJK324 OrfB genomic clone, in the form of an E. coli plasmid containing the OrfB gene sequence from Schizochytrium sp. N230D) was deposited with the American Type Culture Collection (ATCC), 10801 University Boulevard, Manassas, Va. 20110-2209 USA on Jun. 8, 2006, and assigned ATCC Accession No. PTA-7643. The nucleotide sequence of pJK324 OrfB genomic clone, and the amino acid sequence encoded by this plasmid are encompassed by the present invention.

[0084] The first domain in OrfB is a KS domain, also referred to herein as ORFB-KS, and the nucleotide sequence containing the sequence encoding the ORFB-KS domain is represented herein as SEQ ID NO:19 (positions 1-1350 of SEQ ID NO:3). The amino acid sequence containing the ORFB-KS domain is represented herein as SEQ ID NO:20 (positions 1-450 of SEQ ID NO:4). This KS domain comprises a valine at position 371 of SEQ ID NO:20 (also position 371 of SEQ ID NO:20). It is noted that the ORFB-KS domain contains an active site motif: DXAC* (*acyl binding site C₁₉₆). Also, a characteristic motif at the end of this KS region, GFGG, is present in this domain in SEQ ID NO:4 and accordingly, in SEQ ID NO:20.

[0085] The second domain in OrfB is a CLF domain, also referred to herein as ORFB-CLF, and the nucleotide sequence containing the sequence encoding the ORFB-CLF domain is represented herein as SEQ ID NO:21 (positions 1378-2700 of SEQ ID NO:3). The amino acid sequence containing the ORFB-CLF domain is represented herein as SEQ ID NO:22 (positions 460-900 of SEQ ID NO:4). It is noted that the ORFB-CLF domain contains a KS active site motif without the acyl-binding cysteine.

[0086] The third domain in OrfB is an AT domain, also referred to herein as ORFB-AT, and the nucleotide sequence containing the sequence encoding the ORFB-AT domain is represented herein as SEQ ID NO:23 (positions 2701-4200 of SEQ ID NO:3). The amino acid sequence containing the ORFB-AT domain is represented herein as SEQ ID NO:24 (positions 901-1400 of SEQ ID NO:4). It is noted that the ORFB-AT domain contains an active site motif of GxS*xG (*acyl binding site S₁₁₄₀) that is characteristic of acyltransferse (AT) proteins.

[0087] The fourth domain in OrfB is an ER domain, also referred to herein as ORFB-ER, and the nucleotide sequence containing the sequence encoding the ORFB-ER domain is represented herein as SEQ ID NO:25 (positions 4648-6177 of SEQ ID NO:3). The amino acid sequence containing the ORFB-ER domain is represented herein as SEQ ID NO:26 (positions 1550-2059 of SEQ ID NO:4).

Schizochytrium Open Reading Frame C (OrfC):

[0088] The complete nucleotide sequence for OrfC is represented herein as SEQ ID NO:5. OrfC is a 4506 nucleotide sequence (not including the stop codon) which encodes a 1502 amino acid sequence, represented herein as SEQ ID NO:6. Within OrfC are three domains: (a) two FabA-like_{.} -hydroxy acyl-ACP dehydrase (DH) domains; and (b) one enoyl ACP-reductase (ER) domain.

[0089] Genomic DNA clones (plasmids) encoding OrfC from both Schizochytrium sp. ATCC 20888 and a daughter strain of ATCC 20888, denoted Schizochytrium sp., strain N230D, have been isolated and sequenced.

[0090] A genomic clone described herein as pJK1131, isolated from Schizochytrium sp. ATCC 20888, comprises, to the best of the present inventors' knowledge, the nucleotide sequence of SEQ ID NO:5, and encodes the amino acid sequence of SEQ ID NO:6. Genomic clone pJK1131 (denoted pJK1131 OrfC genomic clone, in the form of an E. coli plasmid vector containing “OrfC” gene from Schizochytrium ATCC 20888) was deposited with the American Type Culture Collection (ATCC), 10801 University Boulevard, Manassas, Va. 20110-2209 USA on Jun. 8, 2006, and assigned ATCC Accession No. PTA-7650. The nucleotide sequence of pJK1131 OrfC genomic clone, and the amino acid sequence encoded by this plasmid are encompassed by the present invention.

[0091] A genomic clone described herein as pBR002 OrfC genomic clone, isolated from Schizochytrium sp. N230D, comprises, to the best of the present inventors' knowledge, the nucleotide sequence of SEQ ID NO:5, and encodes the amino acid sequence of SEQ ID NO:6. Genomic clone pBR002 (denoted pBR002 OrfC genomic clone, in the form of an E. coli plasmid vector containing the OrfC gene sequence from Schizochytrium sp. N230D) was deposited with the American Type Culture Collection (ATCC), 10801 University Boulevard, Manassas, Va. 20110-2209 USA on Jun. 8, 2006, and assigned ATCC Accession No. PTA-7642. The nucleotide sequence of pBR002 OrfC genomic clone, and the amino acid sequence encoded by this plasmid are encompassed by the present invention.

[0092] The first domain in OrfC is a DH domain, also referred to herein as ORFC-DH1. This is one of two DH domains in OrfC, and therefore is designated DH1. The nucleotide sequence containing the sequence encoding the ORFC-DH1 domain is represented herein as SEQ ID NO:27 (positions 1-1350 of SEQ ID NO:5). The amino acid sequence containing the ORFC-DH1 domain is represented herein as SEQ ID NO:28 (positions 1-450 of SEQ ID NO:6).

[0093] The second domain in OrfC is a DH domain, also referred to herein as ORFC-DH2. This is the second of two DH domains in OrfC, and therefore is designated DH2. The nucleotide sequence containing the sequence encoding the ORFC-DH2 domain is represented herein as SEQ ID NO:29 (positions 1351-2847 of SEQ ID NO:5). The amino acid sequence containing the ORFC-DH2 domain is represented herein as SEQ ID NO:30 (positions 451-949 of SEQ ID NO:6). This DH domain comprises the amino acids H-G-I-A-N-P-T-F-V-H-A-P-G-K-I (positions 876-890 of SEQ ID NO:6) at positions 426-440 of SEQ ID NO:30.

[0094] The third domain in OrfC is an ER domain, also referred to herein as ORFC-ER, and the nucleotide sequence containing the sequence encoding the ORFC-ER domain is represented herein as SEQ ID NO:31 (positions 2995-4506 of SEQ ID NO:5). The amino acid sequence containing the ORFC-ER domain is represented herein as SEQ ID NO:32 (positions 999-1502 of SEQ ID NO:6).

Thraustochytrium PUFA PKS System

[0095] In one embodiment, a Thraustochytrium PUFA PKS system comprises at least the following biologically active domains: (a) two enoyl-ACP reductase (ER) domain; (b) between five and ten or more acyl carrier protein (ACP) domains, and in one aspect, eight ACP domains; (c) two β-ketoacyl-ACP synthase (KS) domains; (d) one acyltransferase (AT) domain; (e) one β-ketoacyl-ACP reductase (KR) domain; (f) two FabA-like β-hydroxyacyl-ACP dehydrase (DH) domains; (g) one chain length factor (CLF) domain; and (h) one malonyl-CoA:ACP acyltransferase (MAT) domain. In one embodiment, a Thraustochytrium PUFA PKS system according to the present invention also comprises at least one region or domain containing a dehydratase (DH) conserved active site motif that is not a part of a FabA-like DH domain. The structural and functional characteristics of these domains are generally individually known in the art (see, e.g., U.S. Patent Publication No. 2004035127, supra).

[0096] There are three open reading frames that form the core Thraustochytrium 23B PUFA PKS system described previously. The domain structure of each open reading frame is as follows.

Thraustochytrium 23B Open Reading Frame A (OrfA):

[0097] The complete nucleotide sequence for Th. 23B OrfA is represented herein as SEQ ID NO:38. Th. 23B OrfA is a 8433 nucleotide sequence (not including the stop codon) which encodes a 2811 amino acid sequence, represented herein as SEQ ID NO:39. SEQ ID NO:38 encodes the following domains in Th. 23B OrfA: (a) one β-ketoacyl-ACP synthase (KS) domain; (b) one malonyl-CoA:ACP acyltransferase (MAT) domain; (c) eight acyl carrier protein (ACP) domains; and (d) one β-ketoacyl-ACP reductase (KR) domain.

[0098] Two genomic clone described herein as Th23BOrfA_pBR812.1 and Th23BOrfA_pBR811 (OrfA genomic clones), isolated from Thraustochytrium 23B, together (overlapping clones) comprise, to the best of the present inventors' knowledge, the nucleotide sequence of SEQ ID NO:38, and encodes the amino acid sequence of SEQ ID NO:39. Genomic clone Th23BOrfA_pBR812.1 (denoted Th23BOrfA_pBR812.1 genomic clone, in the form of an E. coli plasmid vector containing the OrfA gene sequence from Thraustochytrium 23B) was deposited with the American Type Culture Collection (ATCC), 10801 University Boulevard, Manassas, Va. 20110-2209 USA on Mar. 1, 2007, and assigned ATCC Accession No. ______. The nucleotide sequence of Th23BOrfA_pBR812.1, an OrfA genomic clone, and the amino acid sequence encoded by this plasmid are encompassed by the present invention. Genomic clone Th23BOrfA_pBR811 (denoted Th23BOrfA_pBR811 genomic clone, in the form of an E. coli plasmid vector containing the OrfA gene sequence from Thraustochytrium 23B) was deposited with the American Type Culture Collection (ATCC), 10801 University Boulevard, Manassas, Va. 20110-2209 USA on Mar. 1, 2007, and assigned ATCC Accession No. ______. The nucleotide sequence of Th23BOrfA_pBR811, an OrfA genomic clone, and the amino acid sequence encoded by this plasmid are encompassed by the present invention.

[0099] The first domain in Th. 23B OrfA is a KS domain, also referred to herein as Th. 23B OrfA-KS, and is contained within the nucleotide sequence spanning from about position 1 to about position 1500 of SEQ ID NO:38, represented herein as SEQ ID NO:40. The amino acid sequence containing the Th. 23B KS domain is a region of SEQ ID NO:39 spanning from about position 1 to about position 500 of SEQ ID NO:39, represented herein as SEQ ID NO:41. This region of SEQ ID NO:39 has a Pfam match to FabB (β-ketoacyl-ACP synthase) spanning from position 1 to about position 450 of SEQ ID NO:39 (also positions 1 to about 450 of SEQ ID NO:41). It is noted that the Th. 23B OrfA-KS domain contains an active site motif: DXAC* (*acyl binding site C₂₀₇). Also, a characteristic motif at the end of the Th. 23B KS region, GFGG, is present in positions 453-456 of SEQ ID NO:39 (also positions 453-456 of SEQ ID NO:41).

[0100] The second domain in Th. 23B OrfA is a MAT domain, also referred to herein as Th. 23B OrfA-MAT, and is contained within the nucleotide sequence spanning from between about position 1503 and about position 3000 of SEQ ID NO:38, represented herein as SEQ ID NO:42. The amino acid sequence containing the Th. 23B MAT domain is a region of SEQ ID NO:39 spanning from about position 501 to about position 1000, represented herein by SEQ ID NO:43. This region of SEQ ID NO:39 has a Pfam match to FabD (malonyl-CoA:ACP acyltransferase) spanning from about position 580 to about position 900 of SEQ ID NO:39 (positions 80-400 of SEQ ID NO:43). It is noted that the Th. 23B OrfA-MAT domain contains an active site motif: GHS*XG (*acyl binding site S₆₉₇), represented by positions 695-699 of SEQ ID NO:39.

[0101] Domains 3-10 of Th. 23B OrfA are eight tandem ACP domains, also referred to herein as Th. 23B OrfA-ACP (the first domain in the sequence is OrfA-ACP1, the second domain is OrfA-ACP2, the third domain is OrfA-ACP3, etc.). The first Th. 23B ACP domain, Th. 23B OrfA-ACP1, is contained within the nucleotide sequence spanning from about position 3205 to about position 3555 of SEQ ID NO:38 (OrfA), represented herein as SEQ ID NO:44. The amino acid sequence containing the first Th. 23B ACP domain is a region of SEQ ID NO:39 spanning from about position 1069 to about position 1185 of SEQ ID NO:39, represented herein by SEQ ID NO:45.

[0102] The eight ACP domains in Th. 23B OrfA are adjacent to one another and can be identified by the presence of the phosphopantetheine binding site motif, LGXDS* (represented by SEQ ID NO:46), wherein the S* is the phosphopantetheine attachment site. The amino acid position of each of the eight S* sites, with reference to SEQ ID NO:39, are 1128 (ACP1), 1244 (ACP2), 1360 (ACP3), 1476 (ACP4), 1592 (ACP5), 1708 (ACP6), 1824 (ACP7) and 1940 (ACP8). The nucleotide and amino acid sequences of all eight Th. 23B ACP domains are highly conserved and therefore, the sequence for each domain is not represented herein by an individual sequence identifier. However, based on the information disclosed herein, one of skill in the art can readily determine the sequence containing each of the other seven ACP domains in SEQ ID NO:38 and SEQ ID NO:39.

[0103] All eight Th. 23B ACP domains together span a region of Th. 23B OrfA of from about position 3205 to about position 5994 of SEQ ID NO:38, which corresponds to amino acid positions of from about 1069 to about 1998 of SEQ ID NO:39. The nucleotide sequence for the entire ACP region containing all eight domains is represented herein as SEQ ID NO:47. SEQ ID NO:47 encodes an amino acid sequence represented herein by SEQ ID NO:48. SEQ ID NO:48 includes the linker segments between individual ACP domains. The repeat interval for the eight domains is approximately every 116 amino acids of SEQ ID NO:48, and each domain can be considered to consist of about 116 amino acids centered on the active site motif (described above).

[0104] The last domain in Th. 23B OrfA is a KR domain, also referred to herein as Th. 23B OrfA-KR, which is contained within the nucleotide sequence spanning from between about position 6001 to about position 8433 of SEQ ID NO:38, represented herein by SEQ ID NO:49. The amino acid sequence containing the Th. 23B KR domain is a region of SEQ ID NO:39 spanning from about position 2001 to about position 2811 of SEQ ID NO:39, represented herein by SEQ ID NO:50. This region of SEQ ID NO:39 has a Pfam match to FabG (β-ketoacyl-ACP reductase) spanning from about position 2300 to about 2550 of SEQ ID NO:39 (positions 300-550 of SEQ ID NO:50).

Thraustochytrium. 23B Open Reading Frame B (OrfB):

[0105] The complete nucleotide sequence for Th. 23B OrfB is represented herein as SEQ ID NO:51, which is a 5805 nucleotide sequence (not including the stop codon) that encodes a 1935 amino acid sequence, represented herein as SEQ ID NO:52. SEQ ID NO:51 encodes the following domains in Th. 23B OrfB: (a) one β-ketoacyl-ACP synthase (KS) domain; (b) one chain length factor (CLF) domain; (c) one acyltransferase (AT) domain; and, (d) one enoyl-ACP reductase (ER) domain.

[0106] A genomic clone described herein as Th23BOrfB_pBR800 (OrfB genomic clone), isolated from Thraustochytrium 23B, comprises, to the best of the present inventors' knowledge, the nucleotide sequence of SEQ ID NO:51, and encodes the amino acid sequence of SEQ ID NO:52. Genomic clone Th23BOrfB_pBR800 (denoted Th23BOrfB_pBR800 genomic clone, in the form of an E. coli plasmid vector containing the OrfB gene sequence from Thraustochytrium 23B) was deposited with the American Type Culture Collection (ATCC), 10801 University Boulevard, Manassas, Va. 20110-2209 USA on Mar. 1, 2007, and assigned ATCC Accession No. ______. The nucleotide sequence of Th23BOrfB_pBR800, an OrfB genomic clone, and the amino acid sequence encoded by this plasmid are encompassed by the present invention.

[0107] The first domain in the Th. 23B OrfB is a KS domain, also referred to herein as Th. 23B OrfB-KS, which is contained within the nucleotide sequence spanning from between about position 1 and about position 1500 of SEQ ID NO:51 (Th. 23B OrfB), represented herein as SEQ ID NO:53. The amino acid sequence containing the Th. 23B KS domain is a region of SEQ ID NO: 52 spanning from about position 1 to about position 500 of SEQ ID NO:52, represented herein as SEQ ID NO:54. This region of SEQ ID NO:52 has a Pfam match to FabB (β-ketoacyl-ACP synthase) spanning from about position 1 to about position 450 (positions 1-450 of SEQ ID NO:54). It is noted that the Th. 23B OrfB-KS domain contains an active site motif: DXAC*, where C* is the site of acyl group attachment and wherein the C* is at position 201 of SEQ ID NO:52. Also, a characteristic motif at the end of the KS region, GFGG is present in amino acid positions 434-437 of SEQ ID NO:52.

[0108] The second domain in Th. 23B OrfB is a CLF domain, also referred to herein as Th. 23B OrfB-CLF, which is contained within the nucleotide sequence spanning from between about position 1501 and about position 3000 of SEQ ID NO:51 (OrfB), represented herein as SEQ ID NO:55. The amino acid sequence containing the CLF domain is a region of SEQ ID NO: 52 spanning from about position 501 to about position 1000 of SEQ ID NO:52, represented herein as SEQ ID NO:56. This region of SEQ ID NO:52 has a Pfam match to FabB (β-ketoacyl-ACP synthase) spanning from about position 550 to about position 910 (positions 50-410 of SEQ ID NO:56). Although CLF has homology to KS proteins, it lacks an active site cysteine to which the acyl group is attached in KS proteins.

[0109] The third domain in Th. 23B OrfB is an AT domain, also referred to herein as Th. 23B OrfB-AT, which is contained within the nucleotide sequence spanning from between about position 3001 and about position 4500 of SEQ ID NO:51 (Th. 23B OrfB), represented herein as SEQ ID NO:58. The amino acid sequence containing the Th. 23B AT domain is a region of SEQ ID NO: 52 spanning from about position 1001 to about position 1500 of SEQ ID NO:52, represented herein as SEQ ID NO:58. This region of SEQ ID NO:52 has a Pfam match to FabD (malonyl-CoA:ACP acyltransferase) spanning from about position 1100 to about position 1375 (positions 100-375 of SEQ ID NO:58). Although this AT domain of the PUFA synthases has homology to MAT proteins, it lacks the extended motif of the MAT (key arginine and glutamine residues) and it is not thought to be involved in malonyl-CoA transfers. The GXS*XG motif of acyltransferases is present, with the S* being the site of acyl attachment and located at position 1123 with respect to SEQ ID NO:52.

[0110] The fourth domain in Th. 23B OrfB is an ER domain, also referred to herein as Th. 23B OrfB-ER, which is contained within the nucleotide sequence spanning from between about position 4501 and about position 5805 of SEQ ID NO:51 (OrfB), represented herein as SEQ ID NO:59. The amino acid sequence containing the Th. 23B ER domain is a region of SEQ ID NO: 52 spanning from about position 1501 to about position 1935 of SEQ ID NO:52, represented herein as SEQ ID NO:60. This region of SEQ ID NO:52 has a Pfam match to a family of dioxygenases related to 2-nitropropane dioxygenases spanning from about position 1501 to about position 1810 (positions 1-310 of SEQ ID NO:60). That this domain functions as an ER can be further predicted due to homology to a newly characterized ER enzyme from Streptococcus pneumoniae.

Thraustochytrium. 23B Open Reading Frame C(OrfC):

[0111] The complete nucleotide sequence for Th. 23B OrfC is represented herein as SEQ ID NO:61, which is a 4410 nucleotide sequence (not including the stop codon) that encodes a 1470 amino acid sequence, represented herein as SEQ ID NO:62. SEQ ID NO:61 encodes the following domains in Th. 23B OrfC: (a) two FabA-like β-hydroxyacyl-ACP dehydrase (DH) domains, both with homology to the FabA protein (an enzyme that catalyzes the synthesis of trans-2-decenoyl-ACP and the reversible isomerization of this product to cis-3-decenoyl-ACP); and (b) one enoyl-ACP reductase (ER) domain with high homology to the ER domain of Schizochytrium OrfB.

[0112] A genomic clone described herein as Th23BOrfC_pBR709A (OrfC genomic clone), isolated from Thraustochytrium 23B, comprises, to the best of the present inventors' knowledge, the nucleotide sequence of SEQ ID NO:61, and encodes the amino acid sequence of SEQ ID NO:62. Genomic clone Th23BOrfC_pBR709A (denoted Th23BOrfC_pBR709A genomic clone, in the form of an E. coli plasmid vector containing the OrfC gene sequence from Thraustochytrium 23B) was deposited with the American Type Culture Collection (ATCC), 10801 University Boulevard, Manassas, Va. 20110-2209 USA on Mar. 1, 2007, and assigned ATCC Accession No. ______. The nucleotide sequence of Th23BOrfC_pBR709A, an OrfC genomic clone, and the amino acid sequence encoded by this plasmid are encompassed by the present invention.

[0113] The first domain in Th. 23B OrfC is a DH domain, also referred to herein as Th. 23B OrfC-DH1, which is contained within the nucleotide sequence spanning from between about position 1 to about position 1500 of SEQ ID NO:61 (OrfC), represented herein as SEQ ID NO:63. The amino acid sequence containing the Th. 23B DH1 domain is a region of SEQ ID NO: 62 spanning from about position 1 to about position 500 of SEQ ID NO:62, represented herein as SEQ ID NO:64. This region of SEQ ID NO:62 has a Pfam match to FabA, as mentioned above, spanning from about position 275 to about position 400 (positions 275-400 of SEQ ID NO:64).

[0114] The second domain in Th. 23B OrfC is also a DH domain, also referred to herein as Th. 23B OrfC-DH2, which is contained within the nucleotide sequence spanning from between about position 1501 to about 3000 of SEQ ID NO:61 (OrfC), represented herein as SEQ ID NO:65. The amino acid sequence containing the Th. 23B DH2 domain is a region of SEQ ID NO: 62 spanning from about position 501 to about position 1000 of SEQ ID NO:62, represented herein as SEQ ID NO:66. This region of SEQ ID NO:62 has a Pfam match to FabA, as mentioned above, spanning from about position 800 to about position 925 (positions 300-425 of SEQ ID NO:66).

[0115] The third domain in Th. 23B OrfC is an ER domain, also referred to herein as Th. 23B OrfC-ER, which is contained within the nucleotide sequence spanning from between about position 3001 to about position 4410 of SEQ ID NO:61 (OrfC), represented herein as SEQ ID NO:67. The amino acid sequence containing the Th. 23B ER domain is a region of SEQ ID NO: 62 spanning from about position 1001 to about position 1470 of SEQ ID NO:62, represented herein as SEQ ID NO:68. This region of SEQ ID NO:62 has a Pfam match to the dioxygenases related to 2-nitropropane dioxygenases, as mentioned above, spanning from about position 1025 to about position 1320 (positions 25-320 of SEQ ID NO:68). This domain function as an ER can also be predicted due to homology to a newly characterized ER enzyme from Streptococcus pneumoniae.

Shewanella japonica PUFA PKS

[0116] There are five open reading frames that form the Shewanella japonica core PUFA PKS system and its PPTase described previously. The domain structure of each open reading frame is as follows.

[0117] SEQ ID NO:69 is the nucleotide sequence for Shewanella japonica cosmid 3F3 and is found to contain 15 ORFs. The ORFs related to the PUFA PKS system in this microorganism are characterized as follows.

[0118] pfaA (nucleotides 10491-18854 of SEQ ID NO:69) encodes PFAS A (SEQ ID NO:70), a PUFA PKS protein harboring the following domains: β-ketoacyl-synthase (KS) (nucleotides 10575-12029 of SEQ ID NO:69, amino acids 29-513 of SEQ ID NO:70); malonyl-CoA: ACP acyltransferase (MAT) (nucleotides 12366-13319 of SEQ ID NO:69, amino acids 625-943 of SEQ ID NO:70); six tandem acyl-carrier proteins (ACP) domains (nucleotides 14280-16157 of SEQ ID NO:69, amino acids 1264-1889 of SEQ ID NO:70); β-ketoacyl-ACP reductase (KR) (nucleotides 17280-17684 of SEQ ID NO:69, amino acids 2264-2398 of SEQ ID NO:70); and a region of the PFAS A protein between amino acids 2399 and 2787 of SEQ ID NO:70 containing a dehydratase (DH) conserved active site motif LxxHxxxGxxxxP (amino acids 2504-2516 of SEQ ID NO:70), referred to herein as DH-motif region.

[0119] In PFAS A, a KS active site DXAC* is located at amino acids 226-229 of SEQ ID NO:70 with the C* being the site of the acyl attachment. A MAT active site, GHS*XG, is located at amino acids 721-725 of SEQ ID NO:70, with the S* being the acyl binding site. ACP active sites of LGXDS* are located at the following positions: amino acids 1296-1300, amino acids 1402-1406, amino acids 1513-1517, amino acids 1614-1618, amino acids 1728-1732, and amino acids 1843-1847 in SEQ ID NO:70, with the S* being the phosphopantetheine attachment site. Between amino acids 2399 and 2787 of SEQ ID NO:70, the PFAS A also contains the dehydratase (DH) conserved active site motif LxxHxxxGxxxxP (amino acids 2504-2516 of SEQ ID NO:70) referenced above.

[0120] pfaB (nucleotides 18851-21130 of SEQ ID NO:69) encodes PFAS B (SEQ ID NO:71), a PUFA PKS protein harboring the following domain: acyltransferase (AT) (nucleotides 19982-20902 of SEQ ID NO:69, amino acids 378-684 of SEQ ID NO:71).

[0121] In PFAS B, an active site GXS*XG motif is located at amino acids 463-467 of SEQ ID NO:71, with the S* being the site of acyl-attachment.

[0122] pfaC (nucleotides 21127-27186 of SEQ ID NO:69) encodes PFAS C (SEQ ID NO:72), a PUFA PKS protein harboring the following domains: KS (nucleotides 21139-22575 of SEQ ID NO:69, amino acids 5-483 of SEQ ID NO:72); chain length factor (CLF) (nucleotides 22591-23439 of SEQ ID NO:69, amino acids 489-771 of SEQ ID NO:72); and two FabA 3-hydroxyacyl-ACP dehydratases, referred to as DH1 (nucleotides 25408-25836 of SEQ ID NO:69, amino acids 1428-1570 of SEQ ID NO:72) and DH2 (nucleotides 26767-27183 of SEQ ID NO:69, amino acids 1881-2019 of SEQ ID NO:72).

[0123] In PFAS C, a KS active site DXAC* is located at amino acids 211-214 of SEQ ID NO:72 with the C* being the site of the acyl attachment.

[0124] pfaD (nucleotides 27197-28825 of SEQ ID NO:69) encodes the PFAS D (SEQ ID NO:73), a PUFA PKS protein harboring the following domain: an enoyl reductase (ER) (nucleotides 27446-28687 of SEQ ID NO:69, amino acids 84-497 of SEQ ID NO:73).

[0125] pfaE (nucleotides 6150-7061 of SEQ ID NO:69 on the reverse complementary strand) encodes PFAS E (SEQ ID NO:74), a 4′-phosphopantetheinyl transferase (PPTase) with the identified domain (nucleotides 6504-6944 of SEQ ID NO:69, amino acids 40-186 of SEQ ID NO:74).

Shewanella olleyana PUFA PKS

[0126] There are five open reading frames that form the Shewanella olleyana core PUFA PKS system and its PPTase described previously. The domain structure of each open reading frame is as follows.

[0127] SEQ ID NO:75 is the nucleotide sequence for Shewanella olleyana cosmid 9A10 and was found to contain 17 ORFs. The ORFs related to the PUFA PKS system in this microorganism are characterized as follows.

[0128] pfaA (nucleotides 17437-25743 of SEQ ID NO:75) encodes PFAS A (SEQ ID NO:76), a PUFA PKS protein harboring the following domains: β-ketoacyl-synthase (KS) (nucleotides 17521-18975 of SEQ ID NO:75, amino acids 29-513 of SEQ ID NO:76); malonyl-CoA: ACP acyltransferase (MAT) (nucleotides 19309-20265 of SEQ ID NO:75, amino acids 625-943 of SEQ ID NO:76); six tandem acyl-carrier proteins (ACP) domains (nucleotides 21259-23052 of SEQ ID NO:75, amino acids 1275-1872 of SEQ ID NO:76); β-ketoacyl-ACP reductase (KR) (nucleotides 24154-24558 of SEQ ID NO:75, amino acids 2240-2374 of SEQ ID NO:76); and a region of the PFAS A protein between amino acids 2241 and 2768 of SEQ ID NO:76 containing a dehydratase (DH) conserved active site motif LxxHxxxGxxxxP (amino acids 2480-2492 of SEQ ID NO:76), referred to herein as DH-motif region.

[0129] In PFAS A, a KS active site DXAC* is located at AA 226-229 of SEQ ID NO:76 with the C* being the site of the acyl attachment. A MAT active site, GHS*XG, is located at amino acids 721-725 of SEQ ID NO:76 with the S* being the acyl binding site. ACP active sites of LGXDS* are located at: amino acids 1307-1311, amino acids 1408-1412, amino acids 1509-1513, amino acids 1617-1621, amino acids 1721-1725, and amino acids 1826-1830 in SEQ ID NO:76, with the S* being the phosphopantetheine attachment site. Between amino acids 2241 and 2768 of SEQ ID NO:76, the PFAS A also contains the dehydratase (DH) conserved active site motif LxxHxxxGxxxxP (amino acids 2480-2492 of SEQ ID NO:76) referenced above.

[0130] pfaB (nucleotides 25740-27971 of SEQ ID NO:75) encodes PFAS B (SEQ ID NO:77), a PUFA PKS protein harboring the following domain: acyltransferase (AT) (nucleotides 26837-27848 of SEQ ID NO:75, amino acids 366-703 of SEQ ID NO:77).

[0131] In PFAS B, an active site GXS*XG motif is located at amino acids 451-455 of SEQ ID NO:77 with the S* being the site of acyl-attachment.

[0132] pfaC (nucleotides 27968-34030 of SEQ ID NO:75) encodes PFAS C (SEQ ID NO:78), a PUFA PKS protein harboring the following domains: KS (nucleotides 27995-29431 SEQ ID NO:75, amino acids 10-488 SEQ ID NO:78); chain length factor (CLF) (nucleotides 29471-30217 SEQ ID NO:75, amino acids 502-750 SEQ ID NO:78); and two FabA 3-hydroxyacyl-ACP dehydratases, referred to as DH1 (nucleotides 32258-32686 SEQ ID NO:75, amino acids 1431-1573 SEQ ID NO:78), and DH2 (nucleotides 33611-34027 of SEQ ID NO:75, amino acids 1882-2020 of SEQ ID NO:78).

[0133] In PFAS C, a KS active site DXAC* is located at amino acids 216-219 of SEQ ID NO:78 with the C* being the site of the acyl attachment.

[0134] pfaD (nucleotides 34041-35669 of SEQ ID NO:75) encodes the PFAS D (SEQ ID NO:79), a PUFA PKS protein harboring the following domain: an enoyl reductase (ER) (nucleotides 34290-35531 of SEQ ID NO:75, amino acids 84-497 of SEQ ID NO:79).

[0135] pfaE (nucleotides 13027-13899 of SEQ ID NO:75 on the reverse complementary strand) encodes PFAS E (SEQ ID NO:80), a 4′-phosphopantetheinyl transferase (PPTase) with the identified domain (nucleotides 13369-13815 of SEQ ID NO:75, amino acid 29-177 of SEQ ID NO:80).

Other PUFA PKS Sequences

sOrfA

[0136] SEQ ID NO:35, denoted sOrfA, represents the nucleic acid sequence encoding OrfA from Schizochytrium (SEQ ID NO:1) that has been resynthesized for optimized codon usage in yeast. SEQ ID NO:1 and SEQ ID NO:35 each encode SEQ ID NO:2.

sOrfB

[0137] SEQ ID NO:36, denoted sOrfB, represents the nucleic acid sequence encoding OrfB from Schizochytrium (SEQ ID NO:3) that has been resynthesized for optimized codon usage in yeast. SEQ ID NO:3 and SEQ ID NO:36 each encode SEQ ID NO:4.

OrfB*

[0138] SEQ ID NO:37, denoted OrfB*, represents a nucleic acid sequence encoding OrfB from Schizochytrium (SEQ ID NO:3) that has been resynthesized within a portion of SEQ ID NO:3 for use in plant cells, and that was derived from a very similar sequence initially developed for optimized codon usage in E. coli, also referred to as OrfB*. OrfB* in both forms (for E. coli and for plants) is identical to SEQ ID NO:3 with the exception of a resynthesized BspHI (nucleotide 4415 of SEQ ID NO:3) to a SacII fragment (unique site in SEQ ID NO:3). Both versions (E. coli and plant) have two other codon modifications near the start of the gene as compared with the original genomic sequence of orfB (SEQ ID NO:3). First, the fourth codon, arginine (R), was changed from CGG in the genomic sequence to CGC in orfB*. Second, the fifth codon, asparagine (N), was changed from AAT in the genomic sequence to AAC in orf B*. In order to facilitate cloning of this gene into the plant vectors to create SEQ ID NO:37, a PstI site (CTGCAG) was also engineered into the E. coli orfB* sequence 20 bases from the start of the gene. This change did not alter the amino acid sequence of the encoded protein. Both SEQ ID NO:37 and SEQ ID NO:3 (as well as the OrfB* form for E. coli) encode SEQ ID NO:4.

[0139] A PUFA PKS system can additionally include one or more accessory proteins, which are defined herein as proteins that are not considered to be part of the core PUFA PKS system as described above (i.e., not part of the PUFA synthase enzyme complex itself), but which may be, or are, necessary for PUFA production or at least for efficient PUFA production using the core PUFA synthase enzyme complex of the present invention. For example, in order to produce PUFAs, a PUFA PKS system must work with an accessory protein that transfers a 4′-phosphopantetheinyl moiety from coenzyme A to the acyl carrier protein (ACP) domain(s). Therefore, a PUFA PKS system can be considered to include at least one 4′-phosphopantetheinyl transferase (PPTase) domain, or such a domain can be considered to be an accessory domain or protein to the PUFA PKS system.

[0140] According to the present invention, a domain or protein having 4′-phosphopantetheinyl transferase (PPTase) biological activity (function) is characterized as the enzyme that transfers a 4′-phosphopantetheinyl moiety from Coenzyme A to the acyl carrier protein (ACP). This transfer to an invariant serine reside of the ACP activates the inactive apo-form to the holo-form. In both polyketide and fatty acid synthesis, the phosphopantetheine group forms thioesters with the growing acyl chains. The PPTases are a family of enzymes that have been well characterized in fatty acid synthesis, polyketide synthesis, and non-ribosomal peptide synthesis. The sequences of many PPTases are known, and crystal structures have been determined (e.g., Reuter K, Mofid M R, Marahiel M A, Ficner R. “Crystal structure of the surfactin synthetase-activating enzyme sfp: a prototype of the 4′-phosphopantetheinyl transferase superfamily” EMBO J. 1999 Dec. 1; 18(23):6823-31) as well as mutational analysis of amino acid residues important for activity (Mofid M R, Finking R, Essen L O, Marahiel M A. “Structure-based mutational analysis of the 4′-phosphopantetheinyl transferases Sfp from Bacillus subtilis: carrier protein recognition and reaction mechanism” Biochemistry. 2004 Apr. 13; 43(14):4128-36). These invariant and highly conserved amino acids in PPTases are contained within the pfaE ORFs from both Shewanella strains described above.

[0141] One heterologous PPTase which has been demonstrated previously to recognize the OrfA ACP domains described herein as substrates is the Het I protein of Nostoc sp. PCC 7120 (formerly called Anabaena sp. PCC 7120). Het I is present in a cluster of genes in Nostoc known to be responsible for the synthesis of long chain hydroxy-fatty acids that are a component of a glyco-lipid layer present in heterocysts of that organism (Black and Wolk, 1994, J. Bacteriol. 176, 2282-2292; Campbell et al., 1997, Arch. Microbiol. 167, 251-258). Het I is likely to activate the ACP domains of a protein, Hgl E, present in that cluster. The two ACP domains of Hgl E have a high degree of sequence homology to the ACP domains found in Schizochytrium Orf A. SEQ ID NO:34 represents the amino acid sequence of the Nostoc Het I protein, and is a functional PPTase that can be used with a PUFA PKS system described herein, including the PUFA PKS systems from Schizochytrium and Thraustochytrium. SEQ ID NO:34 is encoded by SEQ ID NO:33. The endogenous start codon of Het I has not been identified (there is no methionine present in the putative protein). There are several potential alternative start codons (e.g., TTG and ATT) near the 5′ end of the open reading frame. No methionine codons (ATG) are present in the sequence. However, the construction of a Het I expression construct was completed using PCR to replace the furthest 5′ potential alternative start codon (TTG) with a methionine codon (ATG, as part of an NdeI restriction enzyme recognition site), and introducing an XhoI site at the 3′ end of the coding sequence, and the encoded PPTase (SEQ ID NO:34) has been shown to be functional.

[0142] Another heterologous PPTase which has been demonstrated previously to recognize the OrfA ACP domains described herein as substrates is sfp, derived from Bacillus subtilis. Sfp has been well characterized, and is widely used due to its ability to recognize a broad range of substrates. Based on published sequence information (Nakana, et al., 1992, Molecular and General Genetics 232: 313-321), an expression vector was previously produced for sfp by cloning the coding region, along with defined up- and downstream flanking DNA sequences, into a pACYC-184 cloning vector. This construct encodes a functional PPTase as demonstrated by its ability to be co-expressed with Schizochytrium Orfs A, B*, and C in E. coli which, under appropriate conditions, resulted in the accumulation of DHA in those cells (see U.S. Patent Application Publication No. 20040235127).

[0143] When genetically modifying organisms (e.g., microorganisms or plants) to express a PUFA PKS system according to the present invention, some host organisms may endogenously express accessory proteins that are needed to work with the PUFA PKS to produce PUFAs (e.g., PPTases). However, some organisms may be transformed with nucleic acid molecules encoding one or more accessory proteins described herein to enable and/or to enhance production of PUFAs by the organism, even if the organism endogenously produces a homologous accessory protein (i.e., some heterologous accessory proteins may operate more effectively or efficiently with the transformed PUFA synthase proteins than the host cells' endogenous accessory protein). The present invention provides an example of yeast and plants that have been genetically modified with the PUFA PKS system of the present invention that includes the accessory PPTase. Structural and functional characteristics of PPTases have been described in detail, for example, in U.S. Patent Application Publication No. 20020194641; U.S. Patent Application Publication No. 20040235127; and U.S. Patent Application Publication No. 20050100995.

[0144] According to the present invention, reference to a “standard” or “classical” pathway for the production of PUFAs refers to the fatty acid synthesis pathway where medium chain-length saturated fatty acids (products of a fatty acid synthase (FAS) system) are modified by a series of elongation and desaturation reactions. The substrates for the elongation reaction are fatty acyl-CoA (the fatty acid chain to be elongated) and malonyl-CoA (the source of the 2 carbons added during each elongation reaction). The product of the elongase reaction is a fatty acyl-CoA that has two additional carbons in the linear chain. The desaturases create cis double bonds in the preexisting fatty acid chain by extraction of 2 hydrogens in an oxygen-dependant reaction. Such pathways and the genes involved in such pathways are well-known in the literature as discussed above.

[0145] As used herein, the term “lipid” includes phospholipids (PL); free fatty acids; esters of fatty acids; triacylglycerols (TAG); diacylglycerides; monoacylglycerides; phosphatides; waxes (esters of alcohols and fatty acids); sterols and sterol esters; carotenoids; xanthophylls (e.g., oxycarotenoids); hydrocarbons; and other lipids known to one of ordinary skill in the art. The terms “polyunsaturated fatty acid” and “PUFA” include not only the free fatty acid form, but other forms as well, such as the TAG form and the PL form.

[0146] To produce significantly high yields of one or more desired polyunsaturated fatty acids, a plant can be genetically modified to introduce a PUFA PKS system into the plant. Plants are not known to endogenously contain a PUFA PKS system, and therefore, the PUFA PKS systems of the present invention represent an opportunity to produce plants with unique fatty acid production capabilities. It is a particularly preferred embodiment of the present invention to genetically engineer plants to produce one or more PUFAs in the same plant, including, EPA, DHA, DPA (n3 or n6), ARA, GLA, SDA and others. The present invention offers the ability to create any one of a number of “designer oils” in various ratios and forms. Moreover, the disclosure of the PUFA PKS genes from the particular marine organisms described herein offer the opportunity to more readily extend the range of PUFA production and successfully produce such PUFAs within temperature ranges used to grow most crop plants.

[0147] Therefore, one embodiment of the present invention relates to a genetically modified plant or part of a plant (e.g., wherein the plant has been genetically modified to express a PUFA PKS system described herein), which includes at least the core PUFA PKS enzyme complex and, in one embodiment, at least one PUFA PKS accessory protein, (e.g., a PPTase), so that the plant produces PUFAs. Preferably, the plant is an oil seed plant, wherein the oil seeds, and/or the oil in the oil seeds, contain PUFAs produced by the PUFA PKS system. Such oils contain a detectable amount of at least one target or primary PUFA that is the product of the PUFA PKS system. Additionally, such oils are substantially free of intermediate or side products that are not the target or primary PUFA products and that are not naturally produced by the endogenous FAS system in the wild-type plants (i.e., wild-type plants produce some shorter or medium chain PUFAs, such as 18 carbon PUFAs, via the FAS system, but there will be new, or additional, fatty acids produced in the plant as a result of genetic modification with a PUFA PKS system). In other words, as compared to the profile of total fatty acids from the wild-type plant (not genetically modified) or the parent plant used as a recipient for the indicated genetic modification, the majority of additional fatty acids (new fatty acids or increased fatty acids resulting from the genetic modification) in the profile of total fatty acids produced by plants that have been genetically modified with a PUFA PKS system, comprise the target or intended PUFA products of the PUFA PKS system (i.e., the majority of additional, or new, fatty acids in the total fatty acids that are produced by the genetically modified plant are the target PUFA(s)).

[0148] Furthermore, to be “substantially free” of intermediate or side products of the system for synthesizing PUFAs, or to not have intermediate or side products present in substantial amounts, means that any intermediate or side product fatty acids (non-target PUFAs) that are produced in the genetically modified plant (and/or parts of plants and/or seed oil fraction) as a result of the introduction or presence of the enzyme system for producing PUFAS (i.e., that are not produced by the wild-type plant or the parent plant used as a recipient for the indicated genetic modification), are present in a quantity that is less than about 10% by weight of the total fatty acids produced by the plant, and more preferably less than about 9%, and more preferably less than about 8%, and more preferably less than about 7%, and more preferably less than about 6%, and more preferably less than about 5%, and more preferably less than about 4%, and more preferably less than about 3%, and more preferably less than about 2%, and more preferably less than about 1% by weight of the total fatty acids produced by the plant, and more preferably less than about 0.5% by weight of the total fatty acids produced by the plant.

[0149] In a preferred embodiment, to be “substantially free” of intermediate or side products of the system for synthesizing PUFAs, or to not have intermediate or side products present in substantial amounts, means that any intermediate or side product fatty acids that are produced in the genetically modified plant (and/or parts of plants and/or in seed oil fraction) as a result of the enzyme system for producing PUFAS (i.e., that are not produced by the wild-type plant or by the parent plant used as a recipient for the indicated genetic modification for production of target PUFAs), are present in a quantity that is less than about 10% by weight of the total additional fatty acids produced by the plant (additional fatty acids being defined as those fatty acids or levels of fatty acids that are not naturally produced by the wild-type plant or by the parent plant that is used as a recipient for the indicated genetic modification for production of target PUFAs), and more preferably less than about 9%, and more preferably less than about 8%, and more preferably less than about 7%, and more preferably less than about 6%, and more preferably less than about 5%, and more preferably less than about 4%, and more preferably less than about 3%, and more preferably less than about 2%, and more preferably less than about 1% of the total additional fatty acids produced by the plant. Therefore, in contrast to the fatty acid profile of plants that have been genetically modified to produce PUFAs via the standard pathway, the majority of fatty acid products resulting from the genetic modification with a PUFA PKS system will be the target or intended fatty acid products.

[0150] When the target product of a PUFA PKS system is a long chain PUFA, such as DHA, DPA (n-6 or n-3), or EPA, intermediate products and side products that are not present in substantial amounts in the total lipids of plants genetically modified with such PUFA PKS can include, but are not limited to: gamma-linolenic acid (GLA; 18:3, n-6); stearidonic acid (STA or SDA; 18:4, n-3); dihomo-gamma-linolenic acid (DGLA or HGLA; 20:3, n-6), arachidonic acid (ARA, C20:4, n-6); eicosatrienoic acid (ETA; 20:3, n-9) and various other intermediate or side products, such as 20:0; 20:1 (Δ5); 20:1 (Δ11); 20:2 (Δ8,11); 20:2 (Δ11,14); 20:3 (Δ5,11,14); 20:3 (Δ11,14,17); mead acid (20:3; Δ5,8,11); or 20:4 (Δ5,1,14,17). In addition, when the target product is a particular PUFA, such as DHA, the intermediate products and side products that are not present in substantial amounts in the total lipids of the genetically modified plants also include other PUFAs, including other PUFAs that are a natural product of a different PUFA PKS system, such as EPA in this example. It is to be noted that the PUFA PKS system of the present invention can also be used, if desired, to produce as a target PUFA a PUFA that can include GLA, SDA or DGLA.

[0151] Using the knowledge of the genetic basis and domain structure of PUFA PKS systems as described herein, the present inventors have designed and produced constructs encoding such a PUFA PKS system and have successfully produced transgenic plants expressing the PUFA PKS system. The transgenic plants produce oils containing PUFAs, and the oils are substantially free of intermediate products that accumulate in a standard PUFA pathway. The present inventors have also demonstrated the use of the constructs to produce PUFAs in another eukaryote, yeast, as a proof-of-concept experiment prior to the production of the transgenic plants. The examples demonstrate that transformation of both yeast and plants with a PUFA PKS system that produces DHA and DPAn-6 as the target PUFAs produces both of these PUFAs as the primary additional fatty acids in the total fatty acids of the plant (i.e., subtracting fatty acids that are produced in the wild-type plant), and in the yeast and further, that any other fatty acids that are not present in the fatty acids of the wild-type plant or parent plant are virtually undetectable. Specific characteristics of genetically modified plants and parts and oils thereof of the present invention are described in detail below.

[0152] As discussed above, the genetically modified plant useful in the present invention has been genetically modified to express a PUFA PKS system. The PUFA PKS system can include any PUFA PKS system, such as any PUFA PKS system described in, for example, U.S. Pat. No. 6,566,583; U.S. Patent Application Publication No. 20020194641; U.S. Patent Application Publication No. 20040235127; U.S. Patent Application Publication No. 20050100995; and PCT Publication No. WO 2006/135866. The PUFA PKS system can be chosen from, but is not limited to, any of the specific PUFA PKS systems identified and characterized in these patents and patent publications, such as the PUFA PKS systems from Schizochytrium sp. American Type Culture Collection (ATCC) No. 20888, and mutant strains derived therefrom (e.g., strain N230D); Thraustochytrium 23B ATCC No. 20892, and mutant strains derived therefrom; Shewanella olleyana Australian Collection of Antarctic Microorganisms (ACAM) strain number 644, and mutant strains derived therefrom; or Shewanella japonica ATCC strain number BAA-316, and mutant strains derived therefrom.

[0153] In one embodiment, the PUFA PKS system comprises domains selected from any of the above PUFA PKS systems, wherein the domains are combined (mixed and matched) to form a complete PUFA PKS system meeting the minimum requirements as discussed above. The plant can also be further modified with at least one domain or biologically active fragment thereof of another PKS system, including, but not limited to, Type I PKS systems (iterative or modular), Type II PKS systems, and/or Type III PKS systems, which may substitute for a domain in a PUFA PKS system. Finally, any of the domains of a PUFA PKS system can be modified from their natural structure to modify or enhance the function of that domain in the PUFA PKS system (e.g., to modify the PUFA types or ratios thereof produced by the system). Such mixing of domains to produce chimeric PUFA PKS proteins is described in the patents and patent publications referenced above.

[0154] Finally, as discussed above, the genetic modification of the plant can include the introduction of one or more accessory proteins that will work with the core PUFA PKS enzyme complex to enable, facilitate, or enhance production of PUFAs by the plant. For example, the present invention includes the transformation of the plant with nucleic acid molecules encoding both a PUFA PKS enzyme complex and a PPTase that will operate with the PUFA PKS complex. Other accessory molecules may also be used to transform the plant, such as any molecules that facilitate the transfer to and accumulation of the PUFAs in the TAG and PL fractions within the plant. Embodiments discussed above are described in detail in U.S. Pat. No. 6,566,583; U.S. Patent Application Publication No. 20020194641; U.S. Patent Application Publication No. 20040235127; U.S. Patent Application Publication No. 20050100995; and U.S. Provisional Application No. 60/689,167.

[0155] As used herein, a genetically modified plant can include any genetically modified plant including higher plants and particularly, any consumable plants or plants useful for producing a desired PUFA of the present invention. “Plant parts”, as used herein, include any parts of a plant, including, but not limited to, seeds (immature or mature), oils, pollen, embryos, flowers, fruits, shoots, leaves, roots, stems, explants, etc. A genetically modified plant has a genome that is modified (i.e., mutated or changed) or contains modified or exogenously introduced nucleic acids, as compared to its normal (i.e., wild-type or naturally occurring) form such that the desired result is achieved (i.e., PUFA PKS activity and production of PUFAs). Genetic modification of a plant can be accomplished using classical strain development and/or molecular genetic techniques. Methods for producing a transgenic plant, wherein a recombinant nucleic acid molecule encoding a desired amino acid sequence is incorporated into the genome of the plant, are known in the art. A preferred plant to genetically modify according to the present invention is preferably a plant suitable for consumption by animals, including humans.

[0156] Preferred plants to genetically modify according to the present invention (i.e., plant host cells) include, but are not limited to any higher plants, including both dicotyledonous and monocotyledonous plants, and particularly consumable plants, including crop plants and especially plants used for their oils. Such plants can include, for example: canola, soybeans, rapeseed, linseed, corn, safflowers, sunflowers and tobacco. Other preferred plants include those plants that are known to produce compounds used as pharmaceutical agents, flavoring agents, nutraceutical agents, functional food ingredients or cosmetically active agents or plants that are genetically engineered to produce these compounds/agents.

[0157] According to the present invention, a genetically modified plant includes a plant that has been modified using recombinant technology, which may be combined with classical mutagenesis and screening techniques. As used herein, genetic modifications that result in a decrease in gene expression, in the function of the gene, or in the function of the gene product (i.e., the protein encoded by the gene) can be referred to as inactivation (complete or partial), deletion, interruption, blockage or down-regulation of a gene. For example, a genetic modification in a gene which results in a decrease in the function of the protein encoded by such gene, can be the result of a complete deletion of the gene (i.e., the gene does not exist, and therefore the protein does not exist), a mutation in the gene which results in incomplete or no translation of the protein (e.g., the protein is not expressed), or a mutation in the gene which decreases or abolishes the natural function of the protein (e.g., a protein is expressed which has decreased or no enzymatic activity or action). Genetic modifications that result in an increase in gene expression or function can be referred to as amplification, overproduction, overexpression, activation, enhancement, addition, or up-regulation of a gene.

[0158] The genetic modification of a plant according to the present invention results in the production of one or more PUFAs by the plant. The PUFA profile and the ratio of the PUFAs produced by the plant is not necessarily the same as the PUFA profile or ratio of PUFAs produced by the organism from which the PUFA PKS system was derived.

[0159] With regard to the production of genetically modified plants, methods for the genetic engineering of plants are also well known in the art. For instance, numerous methods for plant transformation have been developed, including biological and physical transformation protocols. See, for example, Miki et al., “Procedures for Introducing Foreign DNA into Plants” in Methods in Plant Molecular Biology and Biotechnology, Glick, B. R. and Thompson, J. E. Eds. (CRC Press, Inc., Boca Raton, 1993) pp. 67-88. In addition, vectors and in vitro culture methods for plant cell or tissue transformation and regeneration of plants are available. See, for example, Gruber et al., “Vectors for Plant Transformation” in Methods in Plant Molecular Biology and Biotechnology, Glick, B. R. and Thompson, J. E. Eds. (CRC Press, Inc., Boca Raton, 1993) pp. 89-119.

[0160] The most widely utilized method for introducing an expression vector into plants is based on the natural transformation system of Agrobacterium. See, for example, Horsch et al., Science 227:1229 (1985). A. tumefaciens and A. rhizogenes are plant pathogenic soil bacteria which genetically transform plant cells. The Ti and Ri plasmids of A. tumefaciens and A. rhizogenes, respectively, carry genes responsible for genetic transformation of the plant. See, for example, Kado, C. I., Crit. Rev. Plant. Sci. 10:1 (1991). Descriptions of Agrobacterium vector systems and methods for Agrobacterium-mediated gene transfer are provided by numerous references, including Gruber et al., supra, Miki et al., supra, Moloney et al., Plant Cell Reports 8:238 (1989), and U.S. Pat. Nos. 4,940,838 and 5,464,763.

[0161] Another generally applicable method of plant transformation is microprojectile-mediated transformation wherein DNA is carried on the surface of microprojectiles. The expression vector is introduced into plant tissues with a biolistic device that accelerates the microprojectiles to speeds sufficient to penetrate plant cell walls and membranes. Sanford et al., Part. Sci. Technol. 5:27 (1987), Sanford, J. C., Trends Biotech. 6:299 (1988), Sanford, J. C., Physiol. Plant 79:206 (1990), Klein et al., Biotechnology 10:268 (1992).

[0162] Another method for physical delivery of DNA to plants is sonication of target cells. Zhang et al., Bio/Technology 9:996 (1991). Alternatively, liposome or spheroplast fusion have been used to introduce expression vectors into plants. Deshayes et al., EMBO J., 4:2731 (1985), Christou et al., Proc Natl. Acad. Sci. USA 84:3962 (1987). Direct uptake of DNA into protoplasts using CaCl₂ precipitation, polyvinyl alcohol or poly-L-ornithine have also been reported. Hain et al., Mol. Gen. Genet. 199:161 (1985) and Draper et al., Plant Cell Physiol. 23:451 (1982). Electroporation of protoplasts and whole cells and tissues have also been described. Donn et al., In Abstracts of VIIth International Congress on Plant Cell and Tissue Culture IAPTC, A2-38, p. 53 (1990); D'Halluin et al., Plant Cell 4:1495-1505 (1992) and Spencer et al., Plant Mol. Biol. 24:51-61 (1994).

[0163] The targeting of gene products to the plastid or chloroplast is controlled by a signal sequence found at the amino terminal end of various proteins and which is cleaved during import yielding the mature protein (e.g. with regard to chloroplast targeting, see, e.g., Comai et al., J. Biol. Chem. 263: 15104-15109 (1988)). These signal sequences can be fused to heterologous gene products to effect the import of heterologous products into the chloroplast (van den Broeck et al. Nature 313: 358-363 (1985)). DNA encoding for appropriate signal sequences can be isolated from the cDNAs encoding the RUBISCO protein, the CAB protein, the EPSP synthase enzyme, the GS2 protein and many other proteins which are known to be chloroplast localized.

[0164] Naturally occurring chloroplast targeted proteins, synthesized as larger precursor proteins containing an amino-terminal chloroplast targeting peptide directing the precursor to the chloroplast import machinery, are well known in the art. Chloroplast targeting peptides are generally cleaved by specific endoproteases located within the chloroplast organelle, thus releasing the targeted mature and preferably active enzyme from the precursor into the chloroplast milieu. Examples of sequences encoding peptides which are suitable for directing the targeting of the gene or gene product to the chloroplast or plastid of the plant cell include the petunia EPSPS CTP, the Arabidopsis EPSPS CTP2 and intron, and others known to those skilled in the art. Such targeting sequences provide for the desired expressed protein to be transferred to the cell structure in which it most effectively functions, or by transferring the desired expressed protein to areas of the cell in which cellular processes necessary for desired phenotypic function are concentrated. Specific examples of chloroplast targeting peptides are well known in the art and include the Arabidopsis thaliana ribulose bisphosphate carboxylase small subunit ats1A transit peptide, an Arabidopsis thaliana EPSPS transit peptide, and a Zea maize ribulose bisphosphate carboxylase small subunit transit peptide.

[0165] An optimized transit peptide is described, for example, by Van den Broeck et al., “Targeting of a foreign protein to chloroplasts by fusion to the transit peptide from the small subunit of ribulose 1,5-biphosphate carboxylase”, Nature, 313:358-363 (1985). Prokaryotic and eukaryotic signal sequences are disclosed, for example, by Michaelis et al. (1982) Ann. Rev. Microbiol. 36, 425. Additional examples of transit peptides that may be used in the invention include the chloroplast transit peptides such as those described in Von Heijne et al., Plant Mol. Biol. Rep. 9:104-126(1991); Mazur et al., Plant Physiol. 85: 1110 (1987); Vorst et al., Gene 65: 59 (1988). Chen & Jagendorf (J. Biol. Chem. 268: 2363-2367 (1993)) have described use of a chloroplast transit peptide for import of a heterologous transgene. This peptide used is the transit peptide from the rbcS gene from Nicotiana plumbaginifolia (Poulsen et al. Mol. Gen. Genet. 205: 193-200 (1986)). One CTP that has functioned herein to localize heterologous proteins to the chloroplast was derived from Brassica napus acyl-ACP thioesterase (e.g., for sequence of Brassica napus acyl-ACP thioesterase, see Loader et al., 1993, Plant Mol. Biol. 23: 769-778; Loader et al., 1995, Plant Physiol. 110:336-336).

[0166] An alternative means for localizing genes to chloroplast or plastid includes chloroplast or plastid transformation. Recombinant plants can be produced in which only the chloroplast DNA has been altered to incorporate the molecules envisioned in this application. Promoters which function in chloroplasts have been known in the art (Hanley-Bowden et al., Trends in Biochemical Sciences 12:67-70, 1987). Methods and compositions for obtaining cells containing chloroplasts into which heterologous DNA has been inserted have been described, for example by Daniell et al. (U.S. Pat. No. 5,693,507; 1997) and Maliga et al. (U.S. Pat. No. 5,451,513; 1995).

[0167] Accordingly, encompassed by the present invention are methods to genetically modify plant cells by making use of genes from certain marine bacterial and any thraustochytrid or other eukaryotic PUFA PKS systems, and further can utilize gene mixing to extend and/or alter the range of PUFA products to include EPA, DHA, DPA (n-3 or n-6), ARA, GLA, SDA and others. The method to obtain these altered PUFA production profiles includes not only the mixing of genes from various organisms into the thraustochytrid PUFA PKS genes, but also various methods of genetically modifying the endogenous thraustochytrid PUFA PKS genes disclosed herein. Knowledge of the genetic basis and domain structure of the thraustochytrid PUFA PKS system and the marine bacterial PUFA PKS system provides a basis for designing novel genetically modified organisms that produce a variety of PUFA profiles. Novel PUFA PKS constructs prepared in microorganisms such as a thraustochytrid or in E. coli can be isolated and used to transform plants to impart similar PUFA production properties onto the plants. Detailed discussions of particular modifications of PUFA PKS systems that are encompassed by the present invention are set forth, for example, in U.S. Patent Application Publication No. 20020194641; U.S. Patent Application Publication No. 20040235127; and U.S. Patent Application Publication No. 20050100995).

[0168] A genetically modified plant is preferably cultured in a fermentation medium or grown in a suitable medium such as soil. An appropriate, or effective, fermentation medium has been discussed in detail above. A suitable growth medium for higher plants includes any growth medium for plants, including, but not limited to, soil, sand, any other particulate media that support root growth (e.g. vermiculite, perlite, etc.) or hydroponic culture, as well as suitable light, water and nutritional supplements which optimize the growth of the higher plant. The genetically modified plants of the present invention are engineered to produce PUFAs through the activity of the PUFA PKS system. The PUFAs can be recovered through purification processes which extract the compounds from the plant. In a preferred embodiment, the PUFAs are recovered by harvesting the plant. In a particularly preferred embodiment, the PUFAs are recovered by harvesting the oil from the plant (e.g., from the oil seeds). The plant can also be consumed in its natural state or further processed into consumable products.

[0169] Preferably, a genetically modified plant of the invention produces one or more polyunsaturated fatty acids including, but not limited to, EPA (C20:5, n-3), DHA (C22:6, n-3), DPA (C22:5, n-6 or n-3), ARA (C20:4, n-6), GLA (C18:3, n-6), ALA (C18:3, n-3), and/or SDA (C18:4, n-3)), and more preferably, one or more long chain fatty acids (LCPUFAs), including, but not limited to, EPA (C20:5, n-3), DHA (C22:6, n-3), DPA (C22:5, n-6 or n-3), or DTA (C22:4, n-6). In a particularly preferred embodiment, a genetically modified plant of the invention produces one or more polyunsaturated fatty acids including, but not limited to, EPA (C20:5, n-3), DHA (C22:6, n-3), and/or DPA (C22:5, n-6 or n-3).

[0170] Accordingly, one embodiment of the present invention relates to a plant, and preferably an oil seed plant, wherein the plant produces (e.g., in its mature seeds, if an oil seed plant, or in the oil of the seeds of an oil seed plant) at least one PUFA (the target PUFA), and wherein the total fatty acid profile in the plant, or the part of the plant that accumulates PUFAs (e.g., mature seeds, if the plant is an oil seed plant or the oil of the seeds of an oil seed plant), comprises a detectable amount of this PUFA or PUFAs. Preferably, the target PUFA is at least a 20 carbon PUFA and comprises at least 3 double bonds, and more preferably at least 4 double bonds, and even more preferably, at least 5 double bonds. Furthermore, the target PUFA is preferably a PUFA that is not naturally produced by the plant (i.e., the wild-type plant in the absence of genetic modification or the parent plant used as a recipient for the indicated genetic modification). Preferably, the total fatty acid profile in the plant or in the part of the plant that accumulates PUFAs (including the seed oil of the plant) comprises at least 0.1% of the target PUFA(s) by weight of the total fatty acids, and more preferably at least about 0.2%, and more preferably at least about 0.3%, and more preferably at least about 0.4%, and more preferably at least about 0.5%, and more preferably at least about 1%, and more preferably at least about 1.5%, and more preferably at least about 2%, and more preferably at least about 2.5%, and more preferably at least about 3%, and more preferably at least about 3.5%, and more preferably at least about 4%, and more preferably at least about 4.5%, and more preferably at least about 5%, and more preferably at least about 5.5%, and more preferably at least about 10%, and more preferably at least about 15%, and more preferably at least about 20%, and more preferably at least about 25%, and more preferably at least about 30%, and more preferably at least about 35%, and more preferably at least about 40%, and more preferably at least about 45%, and more preferably at least about 50%, and more preferably at least about 55%, and more preferably at least about 60%, and more preferably at least about 65%, and more preferably at least about 70%, and more preferably at least about 75%, and more preferably more that 75% of at least one polyunsaturated fatty acid (the target PUFA or PUFAs) by weight of the total fatty acids produced by the plant, or any percentage from 0.1% to 75%, or greater than 75% (up to 100% or about 100%), in 0.1% increments, of the target PUFA(s). As generally used herein, reference to a percentage amount of PUFA production is by weight of the total fatty acids produced by the organism (plant), unless otherwise stated (e.g., in some cases, percentage by weight is relative to the total fatty acids produced by an enzyme complex, such as a PUFA PKS system). In one embodiment, total fatty acids produced by a plant are presented as a weight percent as determined by gas chromatography (GC) analysis of a fatty acid methyl ester (FAME) preparation, although determination of total fatty acids is not limited to this method.

[0171] As described above, it is an additional characteristic of the total fatty acids produced by the above-described plant (and/or parts of plants or seed oil fraction) that these total fatty acids produced by the plant comprise less than (or do not contain any more than) about 10% by weight of any fatty acids, other than the target PUFA(s) that are produced by the enzyme complex that produces the target PUFA(s). Preferably, any fatty acids that are produced by the enzyme complex that produces the target PUFA(s) (e.g., as a result of genetic modification of the plant with the enzyme or enzyme complex that produces the target PUFA(s)), other than the target PUFA(s), are present at less than about 9%, and more preferably less than about 8%, and more preferably less than about 7%, and more preferably less than about 6%, and more preferably less than about 5%, and more preferably less than about 4%, and more preferably less than about 3%, and more preferably less than about 2%, and more preferably less than about 1% by weight of the total fatty acids produced by the plant.

[0172] In another embodiment, any fatty acids that are produced by the enzyme complex that produces the target PUFA(s) other than the target PUFA(s) are present at less than (or do not contain any more than) about 10% by weight of the total fatty acids that are produced by the enzyme complex that produces the target PUFA(s) in the plant (i.e., this measurement is limited to those total fatty acids that are produced by the enzyme complex that produces the target PUFAs), and more preferably less than about 9%, and more preferably less than about 8%, and more preferably less than about 7%, and more preferably less than about 6%, and more preferably less than about 5%, and more preferably less than about 4%, and more preferably less than about 3%, and more preferably less than about 2%, and more preferably less than about 1% by weight of the total fatty acids, and more preferably less than about 0.5% by weight of the total fatty acids that are produced by the enzyme complex that produces the target PUFA(s) in the plant.

[0173] In another aspect of this embodiment of the invention, the total fatty acids produced by the plant (and/or parts of plants or seed oil fraction) contain less than (or do not contain any more than) 10% PUFAs having 18 or more carbons by weight of the total fatty acids produced by the plant, other than the target PUFA(s) or the PUFAs that are present in the wild-type plant (not genetically modified) or in the parent plant used as a recipient for the indicated genetic modification. In further aspects, the total fatty acids produced by the plant (and/or parts of plants or seed oil fraction) contain less than 9% PUFAs having 18 or more carbons, or less than 8% PUFAs having 18 or more carbons, or less than 7% PUFAs having 18 or more carbons, or less than 6% PUFAs having 18 or more carbons, or less than 5% PUFAs having 18 or more carbons, or less than 4% PUFAs having 18 or more carbons, or less than 3% PUFAs having 18 or more carbons, or less than 2% PUFAs having 18 or more carbons, or less than 1% PUFAs having 18 or more carbons by weight of the total fatty acids produced by the plant, other than the target PUFA(s) or the PUFAs that are present in the wild-type plant (not genetically modified) or the parent plant used as a recipient for the indicated genetic modification.

[0174] In another aspect of this embodiment of the invention, the total fatty acids produced by the plant (and/or parts of plants or seed oil fraction) contain less than (or do not contain any more than) 10% PUFAs having 20 or more carbons by weight of the total fatty acids produced by the plant, other than the target PUFA(s) or the PUFAs that are present in the wild-type plant (not genetically modified) or the parent plant used as a recipient for the indicated genetic modification. In further aspects, the total fatty acids produced by the plant (and/or parts of plants or seed oil fraction) contain less than 9% PUFAs having 20 or more carbons, or less than 8% PUFAs having 20 or more carbons, or less than 7% PUFAs having 20 or more carbons, or less than 6% PUFAs having 20 or more carbons, or less than 5% PUFAs having 20 or more carbons, or less than 4% PUFAs having 20 or more carbons, or less than 3% PUFAs having 20 or more carbons, or less than 2% PUFAs having 20 or more carbons, or less than 1% PUFAs having 20 or more carbons by weight of the total fatty acids produced by the plant, other than the target PUFA(s) or the PUFAs that are present in the wild-type plant (not genetically modified) or the parent plant used as a recipient for the indicated genetic modification.

[0175] In one embodiment, the total fatty acids in the plant (and/or parts of plants or seed oil fraction) contain less than about 10% by weight of the total fatty acids produced by the plant, and more preferably less than about 9%, and more preferably less than about 8%, and more preferably less than about 7%, and more preferably less than about 6%, and more preferably less than about 5%, and more preferably less than about 4%, and more preferably less than about 3%, and more preferably less than about 2%, and more preferably less than about 1% of a fatty acid selected from any one or more of: gamma-linolenic acid (GLA; 18:3, n-6); stearidonic acid (STA or SDA; 18:4, n-3); dihomo-gamma-linolenic acid (DGLA or HGLA; 20:3, n-6), arachidonic acid (ARA, C20:4, n-6); eicosatrienoic acid (ETA; 20:3, n-9) and various other fatty acids, such as 20:0; 20:1 (Δ5); 20:1 (Δ11); 20:2 (Δ8,11); 20:2 (Δ11,14); 20:3 (Δ5,11,14); 20:3 (Δ11,14,17); mead acid (20:3; Δ5,8,11); or 20:4 (Δ5,1,14,17).

[0176] In another embodiment, the fatty acids that are produced by the enzyme system that produces the long chain PUFAs in the plant contain less than about 10% by weight of a fatty acid selected from: gamma-linolenic acid (GLA; 18:3, n-6); stearidonic acid (STA or SDA; 18:4, n-3); dihomo-gamma-linolenic acid (DGLA or HGLA; 20:3, n-6), arachidonic acid (ARA, C20:4, n-6); eicosatrienoic acid (ETA; 20:3, n-9) and various other fatty acids, such as 20:0; 20:1 (Δ5); 20:1 (Δ11); 20:2 (Δ8,11); 20:2 (Δ11,14); 20:3 (Δ5,11,14); 20:3 (Δ11,14,17); mead acid (20:3; Δ5,8,11); or 20:4 (Δ5,1,14,17), as a percentage of the total fatty acids produced by the plant, and more preferably less than about 9%, and more preferably less than about 8%, and more preferably less than about 7%, and more preferably less than about 6%, and more preferably less than about 5%, and more preferably less than about 4%, and more preferably less than about 3%, and more preferably less than about 2%, and more preferably less than about 1% of a fatty acid selected from: gamma-linolenic acid (GLA; 18:3, n-6); stearidonic acid (STA or SDA; 18:4, n-3); dihomo-gamma-linolenic acid (DGLA or HGLA; 20:3, n-6), arachidonic acid (ARA, C20:4, n-6); eicosatrienoic acid (ETA; 20:3, n-9) and various other fatty acids, such as 20:0; 20:1 (Δ5); 20:1 (Δ11); 20:2 (Δ8,11); 20:2 (Δ11,14); 20:3 (Δ5,11,14); 20:3 (Δ11,14,17); mead acid (20:3; Δ5,8,11); or 20:4 (Δ5,1,14,17).

[0177] In another embodiment, the fatty acids that are produced by the enzyme system that produces the long chain PUFAs in the plant contain less than about 10% by weight of all of the following PUFAs: gamma-linolenic acid (GLA; 18:3, n-6), PUFAs having 18 carbons and four carbon-carbon double bonds, PUFAs having 20 carbons and three carbon-carbon double bonds, and PUFAs having 22 carbons and two or three carbon-carbon double bonds, as a percentage of the total fatty acids produced by the plant, and more preferably less than about 9%, and more preferably less than about 8%, and more preferably less than about 7%, and more preferably less than about 6%, and more preferably less than about 5%, and more preferably less than about 4%, and more preferably less than about 3%, and more preferably less than about 2%, and more preferably less than about 1% of all of the following PUFAs: gamma-linolenic acid (GLA; 18:3, n-6), PUFAs having 18 carbons and four carbon-carbon double bonds, PUFAs having 20 carbons and three carbon-carbon double bonds, and PUFAs having 22 carbons and two or three carbon-carbon double bonds.

[0178] In another embodiment, the fatty acids that are produced by the enzyme system that produces the long chain PUFAs in the plant contain less than about 10% by weight of each of the following PUFAs: gamma-linolenic acid (GLA; 18:3, n-6), PUFAs having 18 carbons and four carbon-carbon double bonds, PUFAs having 20 carbons and three carbon-carbon double bonds, and PUFAs having 22 carbons and two or three carbon-carbon double bonds, as a percentage of the total fatty acids produced by the plant, and more preferably less than about 9%, and more preferably less than about 8%, and more preferably less than about 7%, and more preferably less than about 6%, and more preferably less than about 5%, and more preferably less than about 4%, and more preferably less than about 3%, and more preferably less than about 2%, and more preferably less than about 1% of each of the following PUFAs: gamma-linolenic acid (GLA; 18:3, n-6), PUFAs having 18 carbons and four carbon-carbon double bonds, PUFAs having 20 carbons and three carbon-carbon double bonds, and PUFAs having 22 carbons and two or three carbon-carbon double bonds.

[0179] In another embodiment, the fatty acids that are produced by the enzyme system that produces the long chain PUFAs in the plant contain less than about 10% by weight of any one or more of the following PUFAs: gamma-linolenic acid (GLA; 18:3, n-6), PUFAs having 18 carbons and four carbon-carbon double bonds, PUFAs having 20 carbons and three carbon-carbon double bonds, and PUFAs having 22 carbons and two or three carbon-carbon double bonds, as a percentage of the total fatty acids produced by the plant, and more preferably less than about 9%, and more preferably less than about 8%, and more preferably less than about 7%, and more preferably less than about 6%, and more preferably less than about 5%, and more preferably less than about 4%, and more preferably less than about 3%, and more preferably less than about 2%, and more preferably less than about 1% of any one or more of the following PUFAs: gamma-linolenic acid (GLA; 18:3, n-6), PUFAs having 18 carbons and four carbon-carbon double bonds, PUFAs having 20 carbons and three carbon-carbon double bonds, and PUFAs having 22 carbons and two or three carbon-carbon double bonds.

[0180] In one aspect of this embodiment of the invention, the plant produces at least two target PUFAs, and the total fatty acid profile in the plant, or the part of the plant that accumulates PUFAs (including oils from the oil seeds), comprises a detectable amount of these PUFAs. In this embodiment, the PUFAs are preferably each at least a 20 carbon PUFA and comprise at least 3 double bonds, and more preferably at least 4 double bonds, and even more preferably, at least 5 double bonds. Such PUFAs are most preferably chosen from DHA, DPAn-6 and EPA. In one aspect, the plant produces DHA and DPAn-6, and the ratio of DHA to DPAn-6 is from about 1:10 to about 10:1, including any ratio in between. In a one embodiment, the ratio of DHA to DPA is from about 1:1 to about 3:1, and in another embodiment, about 2.5:1. In one embodiment, the plant produces DHA and EPA.

[0181] In another aspect of this embodiment of the invention, the plant produces the total fatty acid profile represented by FIG. 3.

[0182] The invention further includes any seeds produced by the plants described herein, as well as any oils produced by the plants or seeds described herein. The invention also includes any products produced using the plants, seed or oils described herein.

[0183] Preferably, a plant having any of the above-identified characteristics is a plant that has been genetically modified to express a PUFA PKS system (PUFA synthase) as described in detail herein (i.e., the PUFA PKS system is the enzyme system that produces the target PUFA(s) in the plant). In one embodiment, the plant has been genetically modified to express a PUFA PKS system comprised of PUFA PKS proteins/domains from a thraustochytrid, including, but not limited to, Schizochytrium, Thraustochytrium, Ulkenia, Japonochytrium, Aplanochytrium, Althornia, or Elina. In one embodiment, the plant has been genetically modified to express a PUFA PKS system comprised of PUFA PKS proteins/domains from a labrynthulid. In another embodiment, the plant has been genetically modified to express a PUFA PKS system comprised of PUFA PKS proteins/domains from a marine bacterium, including, but not limited to, Shewanella japonica or Shewanella olleyana. In one embodiment, the plant has been genetically modified to express a PUFA PKS system comprised of Schizochytrium OrfsA, B and C (including homologues or synthetic versions thereof), and a PPTase (e.g., HetI) as described above (e.g., see SEQ ID NOs:1-32 and SEQ ID NO:33, and discussion of Schizochytrium PUFA PKS system above). In another embodiment, the plant has been genetically modified to express a PUFA PKS system comprised of Thraustochytrium OrfsA, B and C (including homologues or synthetic versions thereof), and a PPTase (e.g., HetI) as described above (e.g., see SEQ ID NOs:38-68 and SEQ ID NO:33, and discussion of Thraustochytrium PUFA PKS system above; see also U.S. Patent Application Publication No. 20050014231). In another embodiment, the plant has been genetically modified to express a PUFA PKS system comprised of other thraustochytrid OrfsA, B and C (including homologues or synthetic versions thereof), and a PPTase (e.g., HetI) (e.g., see PCT Patent Publication No. WO 05/097982). In another embodiment, the plant has been genetically modified to express a PUFA PKS system comprised of PUFA PKS Orfs from marine bacteria such as Shewanella (including homologues or synthetic versions thereof), and a PPTase (e.g., the endogenous Shewanella PPTase) as described above (e.g., see SEQ ID NOs:1-6 for Shewanella japonica, SEQ ID NOs: 7-12 for Shewanella olleyana). In another embodiment, the plant has been genetically modified to express any combinations of domains and proteins from such PUFA PKS systems (e.g., a chimeric PUFA PKS system).

[0184] The invention further includes any seeds produced by the plants described herein, as well as any oils produced by the plants or seeds described herein. The invention also includes any products produced using the plants, seed or oils described herein.

[0185] One embodiment of the present invention relates to a method to modify a product containing at least one fatty acid, comprising adding to the product a plant, a plant part, a seed or an oil produced by a genetically modified plant according to the invention and as described herein (e.g., a plant that has been genetically modified with a PUFA PKS system and has the fatty acid profile described herein). Any products produced by this method or generally containing any plants, plant parts, seed or oils from the plants described herein are also encompassed by the invention.

[0186] Preferably, the product is selected from the group consisting of a food, a dietary supplement, a pharmaceutical formulation, a humanized animal milk, and an infant formula.

[0187] Suitable pharmaceutical formulations include, but are not limited to, an anti-inflammatory formulation, a chemotherapeutic agent, an active excipient, an osteoporosis drug, an anti-depressant, an anti-convulsant, an anti-Heliobactor pylori drug, a drug for treatment of neurodegenerative disease, a drug for treatment of degenerative liver disease, an antibiotic, and a cholesterol lowering formulation. In one embodiment, the product is used to treat a condition selected from the group consisting of: chronic inflammation, acute inflammation, gastrointestinal disorder, cancer, cachexia, cardiac restenosis, neurodegenerative disorder, degenerative disorder of the liver, blood lipid disorder, osteoporosis, osteoarthritis, autoimmune disease, preeclampsia, preterm birth, age related maculopathy, pulmonary disorder, and peroxisomal disorder.

[0188] Suitable food products include, but are not limited to, fine bakery wares, bread and rolls, breakfast cereals, processed and unprocessed cheese, condiments (ketchup, mayonnaise, etc.), dairy products (milk, yogurt), puddings and gelatine desserts, carbonated drinks, teas, powdered beverage mixes, processed fish products, fruit-based drinks, chewing gum, hard confectionery, frozen dairy products, processed meat products, nut and nut-based spreads, pasta, processed poultry products, gravies and sauces, potato chips and other chips or crisps, chocolate and other confectionery, soups and soup mixes, soya based products (milks, drinks, creams, whiteners), vegetable oil-based spreads, and vegetable-based drinks.

General Definitions

[0189] According to the present invention, the term “thraustochytrid” refers to any members of the order Thraustochytriales, which includes the family Thraustochytriaceae, and the term “labyrinthulid” refers to any member of the order Labyrinthulales, which includes the family Labyrinthulaceae. The members of the family Labyrinthulaceae were at one time considered to be members of the order Thraustochytriales, but in more recent revisions of the taxonomy of such organisms, the family is now considered to be a member of the order Labyrinthulales, and both Labyrinthulales and Thraustochytriales are considered to be members of the phylum Labyrinthulomycota. Developments have resulted in frequent revision of the taxonomy of the thraustochytrids and labyrinthulids. However, taxonomic theorists now generally place both of these groups of microorganisms with the algae or algae-like protists within the Stramenopile lineage. The current taxonomic placement of the thraustochytrids and labyrinthulids can be summarized as follows:
[0190] Realm: Stramenopila (Chromista)
   [0191] Phylum: Labyrinthulomycota
      [0192] Class: Labyrinthulomycetes
         [0193] Order: Labyrinthulales
         [0194] Family: Labyrinthulaceae
         [0195] Order: Thraustochytriales
         [0196] Family: Thraustochytriaceae

[0197] However, because of remaining taxonomic uncertainties it would be best for the purposes of the present invention to consider the strains described in the present invention as thraustochytrids to include the following organisms: Order: Thraustochytriales; Family: Thraustochytriaceae; Genera: Thraustochytrium (Species: sp., arudimentale, aureum, benthicola, globosum, kinnei, motivum, multirudimentale, pachyderm, proliferum, roseum, striatum), Ulkenia (Species: sp., amoeboidea, kerguelensis, minuta, profunda, radiata, sailens, sarkariana, schizochytrops, visurgensis, yorkensis), Schizochytrium (Species: sp., aggregatum, limnaceum, mangrovei, minutum, octosporum), Japonochytrium (Species: sp., marinum), Aplanochytrium (Species: sp., haliotidis, kerguelensis, profunda, stocchinoi), Althornia (Species: sp., crouchii), or Elina (Species: sp., marisalba, sinorifica). It is to be noted that the original description of the genus Ulkenia was not published in a peer-reviewed journal so some questions remain as to the validity of this genus and the species placed within it. For the purposes of this invention, species described within Ulkenia will be considered to be members of the genus Thraustochytrium.

[0198] Strains described in the present invention as Labyrinthulids include the following organisms: Order: Labyrinthulales, Family: Labyrinthulaceae, Genera: Labyrinthula (Species: sp., algeriensis, coenocystis, chattonii, macrocystis, macrocystis atlantica, macrocystis macrocystis, marina, minuta, roscoffensis, valkanovii, vitellina, vitellina pacifica, vitellina vitellina, zopfii), Labyrinthuloides (Species: sp., haliotidis, yorkensis), Labyrinthomyxa (Species: sp., marina), Diplophrys (Species: sp., archeri), Pyrrhosorus (Species: sp., marinus), Sorodiplophrys (Species: sp., stercorea) or Chlamydomyxa (Species: sp., labyrinthuloides, montana) (although there is currently not a consensus on the exact taxonomic placement of Pyrrhosorus, Sorodiplophrys or Chlamydomyxa).

[0199] According to the present invention, an isolated protein or peptide, such as a protein or peptide from a PUFA PKS system, is a protein or a fragment thereof (including a polypeptide or peptide) that has been removed from its natural milieu (i.e., that has been subject to human manipulation) and can include purified proteins, partially purified proteins, recombinantly produced proteins, and synthetically produced proteins, for example. As such, “isolated” does not reflect the extent to which the protein has been purified. Preferably, an isolated protein of the present invention is produced recombinantly. An isolated peptide can be produced synthetically (e.g., chemically, such as by peptide synthesis) or recombinantly.

[0200] According to the present invention, the terms “modification” and “mutation” can be used interchangeably, particularly with regard to the modifications/mutations to the primary amino acid sequences of a protein or peptide (or nucleic acid sequences) described herein. The term “modification” can also be used to describe post-translational modifications to a protein or peptide including, but not limited to, methylation, farnesylation, carboxymethylation, geranyl geranylation, glycosylation, phosphorylation, acetylation, myristoylation, prenylation, palmitation, and/or amidation. Modifications can also include, for example, complexing a protein or peptide with another compound. Such modifications can be considered to be mutations, for example, if the modification is different than the post-translational modification that occurs in the natural, wild-type protein or peptide.

[0201] As used herein, the term “homologue” is used to refer to a protein or peptide which differs from a naturally occurring protein or peptide (i.e., the “prototype” or “wild-type” protein) by one or more minor modifications or mutations to the naturally occurring protein or peptide, but which maintains the overall basic protein and side chain structure of the naturally occurring form (i.e., such that the homologue is identifiable as being related to the wild-type protein). Such changes include, but are not limited to: changes in one or a few amino acid side chains; changes one or a few amino acids, including deletions (e.g., a truncated version of the protein or peptide) insertions and/or substitutions; changes in stereochemistry of one or a few atoms; and/or minor derivatizations, including but not limited to: methylation, farnesylation, geranyl geranylation, glycosylation, carboxymethylation, phosphorylation, acetylation, myristoylation, prenylation, palmitation, and/or amidation. A homologue can have either enhanced, decreased, or substantially similar properties as compared to the naturally occurring protein or peptide. Preferred homologues of a PUFA PKS protein or domain are described in detail below. It is noted that homologues can include synthetically produced homologues, naturally occurring allelic variants of a given protein or domain, or homologous sequences from organisms other than the organism from which the reference sequence was derived.

[0202] Conservative substitutions typically include substitutions within the following groups: glycine and alanine; valine, isoleucine and leucine; aspartic acid, glutamic acid, asparagine, and glutamine; serine and threonine; lysine and arginine; and phenylalanine and tyrosine. Substitutions may also be made on the basis of conserved hydrophobicity or hydrophilicity (Kyte and Doolittle, J. Mol. Biol. 157:105 (1982)), or on the basis of the ability to assume similar polypeptide secondary structure (Chou and Fasman, Adv. Enzymol. 47: 45 (1978)).

[0203] Homologues can be the result of natural allelic variation or natural mutation. A naturally occurring allelic variant of a nucleic acid encoding a protein is a gene that occurs at essentially the same locus (or loci) in the genome as the gene which encodes such protein, but which, due to natural variations caused by, for example, mutation or recombination, has a similar but not identical sequence. Allelic variants typically encode proteins having similar activity to that of the protein encoded by the gene to which they are being compared. One class of allelic variants can encode the same protein but have different nucleic acid sequences due to the degeneracy of the genetic code. Allelic variants can also comprise alterations in the 5′ or 3′ untranslated regions of the gene (e.g., in regulatory control regions). Allelic variants are well known to those skilled in the art.

[0204] Homologues can be produced using techniques known in the art for the production of proteins including, but not limited to, direct modifications to the isolated, naturally occurring protein, direct protein synthesis, or modifications to the nucleic acid sequence encoding the protein using, for example, classic or recombinant DNA techniques to effect random or targeted mutagenesis.

[0205] Modifications or mutations in protein homologues, as compared to the wild-type protein, either increase, decrease, or do not substantially change, the basic biological activity of the homologue as compared to the naturally occurring (wild-type) protein. In general, the biological activity or biological action of a protein refers to any function(s) exhibited or performed by the protein that is ascribed to the naturally occurring form of the protein as measured or observed in vivo (i.e., in the natural physiological environment of the protein) or in vitro (i.e., under laboratory conditions). Biological activities of PUFA PKS systems and the individual proteins/domains that make up a PUFA PKS system have been described in detail elsewhere herein and in the referenced patents and applications. Modifications of a protein, such as in a homologue, may result in proteins having the same biological activity as the naturally occurring protein, or in proteins having decreased or increased biological activity as compared to the naturally occurring protein. Modifications which result in a decrease in protein expression or a decrease in the activity of the protein, can be referred to as inactivation (complete or partial), down-regulation, or decreased action (or activity) of a protein. Similarly, modifications which result in an increase in protein expression or an increase in the activity of the protein, can be referred to as amplification, overproduction, activation, enhancement, up-regulation or increased action (or activity) of a protein. It is noted that general reference to a homologue having the biological activity of the wild-type protein does not necessarily mean that the homologue has identical biological activity as the wild-type protein, particularly with regard to the level of biological activity. Rather, a homologue can perform the same biological activity as the wild-type protein, but at a reduced or increased level of activity as compared to the wild-type protein. A functional domain of a PUFA PKS system is a domain (i.e., a domain can be a portion of a protein) that is capable of performing a biological function (i.e., has biological activity).

[0206] Methods of detecting and measuring PUFA PKS protein or domain biological activity include, but are not limited to, measurement of transcription of a PUFA PKS gene, measurement of translation of a PUFA PKS protein or domain, measurement of posttranslational modification of a PUFA PKS protein or domain, measurement of enzymatic activity of a PUFA PKS protein or domain, and/or measurement production of one or more products of a PUFA PKS system (e.g., PUFA production). It is noted that an isolated protein of the present invention (including a homologue) is not necessarily required to have the biological activity of the wild-type protein. For example, a PUFA PKS protein or domain can be a truncated, mutated or inactive protein, for example. Such proteins are useful in screening assays, for example, or for other purposes such as antibody production. In a preferred embodiment, the isolated proteins of the present invention have a biological activity that is similar to that of the wild-type protein (although not necessarily equivalent, as discussed above).

[0207] Methods to measure protein expression levels generally include, but are not limited to: Western blot, immunoblot, enzyme-linked immunosorbant assay (ELISA), radioimmunoassay (RIA), immunoprecipitation, surface plasmon resonance, chemiluminescence, fluorescent polarization, phosphorescence, immunohistochemical analysis, matrix-assisted laser desorption/ionization time-of-flight (MALDI-TOF) mass spectrometry, microcytometry, microarray, microscopy, fluorescence activated cell sorting (FACS), and flow cytometry, as well as assays based on a property of the protein including but not limited to enzymatic activity or interaction with other protein partners. Binding assays are also well known in the art. For example, a BIAcore machine can be used to determine the binding constant of a complex between two proteins. The dissociation constant for the complex can be determined by monitoring changes in the refractive index with respect to time as buffer is passed over the chip (O'Shannessy et al. Anal. Biochem. 212:457 (1993); Schuster et al., Nature 365:343 (1993)). Other suitable assays for measuring the binding of one protein to another include, for example, immunoassays such as enzyme linked immunoabsorbent assays (ELISA) and radioimmunoassays (RIA); or determination of binding by monitoring the change in the spectroscopic or optical properties of the proteins through fluorescence, UV absorption, circular dichroism, or nuclear magnetic resonance (NMR).

[0208] According to the present invention, the term “contiguous” or “consecutive”, with regard to nucleic acid or amino acid sequences described herein, means to be connected in an unbroken sequence. For example, for a first sequence to comprise 30 contiguous (or consecutive) amino acids of a second sequence, means that the first sequence includes an unbroken sequence of 30 amino acid residues that is 100% identical to an unbroken sequence of 30 amino acid residues in the second sequence. Similarly, for a first sequence to have “100% identity” with a second sequence means that the first sequence exactly matches the second sequence with no gaps between nucleotides or amino acids.

[0209] Typically, a homologue of a reference protein has an amino acid sequence that is at least about 50% identical, and more preferably at least about 55% identical, and more preferably at least about 60% identical, and more preferably at least about 65% identical, and more preferably at least about 70% identical, and more preferably at least about 75% identical, and more preferably at least about 80% identical, and more preferably at least about 85% identical, and more preferably at least about 90% identical, and more preferably at least about 95% identical, and more preferably at least about 96% identical, and more preferably at least about 97% identical, and more preferably at least about 98% identical, and more preferably at least about 99% identical (or any percentage between 60% and 99%, in whole single percentage increments) to the amino acid sequence of the reference protein (e.g., to a protein that is a part of a PUFA PKS system, or to a domain contained within such protein). The homologue preferably has a biological activity of the protein or domain from which it is derived or related (i.e., the protein or domain having the reference amino acid sequence). The invention expressly includes such homologues of any of the PUFA PKS proteins described herein.

[0210] As used herein, unless otherwise specified, reference to a percent (%) identity refers to an evaluation of homology which is performed using: (1) a BLAST 2.0 Basic BLAST homology search using blastp for amino acid searches, blastn for nucleic acid searches, and blastX for nucleic acid searches and searches of translated amino acids in all 6 open reading frames, all with standard default parameters, wherein the query sequence is filtered for low complexity regions by default (described in Altschul, S. F., Madden, T. L., Schääffer, A. A., Zhang, J., Zhang, Z., Miller, W. & Lipman, D. J. (1997) “Gapped BLAST and PSI-BLAST: a new generation of protein database search programs.” Nucleic Acids Res. 25:3389, incorporated herein by reference in its entirety); (2) a BLAST 2 alignment (using the parameters described below); (3) and/or PSI-BLAST with the standard default parameters (Position-Specific Iterated BLAST). It is noted that due to some differences in the standard parameters between BLAST 2.0 Basic BLAST and BLAST 2, two specific sequences might be recognized as having significant homology using the BLAST 2 program, whereas a search performed in BLAST 2.0 Basic BLAST using one of the sequences as the query sequence may not identify the second sequence in the top matches. In addition, PSI-BLAST provides an automated, easy-to-use version of a “profile” search, which is a sensitive way to look for sequence homologues. The program first performs a gapped BLAST database search. The PSI-BLAST program uses the information from any significant alignments returned to construct a position-specific score matrix, which replaces the query sequence for the next round of database searching. Therefore, it is to be understood that percent identity can be determined by using any one of these programs.

[0211] Two specific sequences can be aligned to one another using BLAST 2 sequence as described in Tatusova and Madden, “Blast 2 sequences—a new tool for comparing protein and nucleotide sequences”, FEMS Microbiol Lett. 174:247 (1999), incorporated herein by reference in its entirety. BLAST 2 sequence alignment is performed in blastp or blastn using the BLAST 2.0 algorithm to perform a Gapped BLAST search (BLAST 2.0) between the two sequences allowing for the introduction of gaps (deletions and insertions) in the resulting alignment. For purposes of clarity herein, a BLAST 2 sequence alignment is performed using the standard default parameters as follows.

[0212] For blastn, using 0 BLOSUM62 matrix:
[0213] Reward for match=1
[0214] Penalty for mismatch=−2
[0215] Open gap (5) and extension gap (2) penalties
[0216] gap x_dropoff (50) expect (10) word size (11) filter (on)

[0217] For blastp, using 0 BLOSUM62 matrix:
[0218] Open gap (11) and extension gap (1) penalties
[0219] gap x_dropoff (50) expect (10) word size (3) filter (on).

[0220] According to the present invention, an amino acid sequence that has a biological activity of at least one domain of a PUFA PKS system is an amino acid sequence that has the biological activity of at least one domain of the PUFA PKS system described in detail herein (e.g., a KS domain, an AT domain, a CLF domain, etc.). Therefore, an isolated protein useful in the present invention can include: the translation product of any PUFA PKS open reading frame, any PUFA PKS domain, any biologically active fragment of such a translation product or domain, or any homologue of a naturally occurring PUFA PKS open reading frame product or domain which has biological activity.

[0221] In one aspect of the invention, a PUFA PKS protein or domain encompassed by the present invention, including a homologue of a particular PUFA PKS protein or domain described herein, comprises an amino acid sequence that includes at least about 100 consecutive amino acids of the amino acid sequence from the reference PUFA PKS protein, wherein the amino acid sequence of the homologue has a biological activity of at least one domain or protein as described herein. In a further aspect, the amino acid sequence of the protein is comprises at least about 200 consecutive amino acids, and more preferably at least about 300 consecutive amino acids, and more preferably at least about 400 consecutive amino acids, and more preferably at least about 500 consecutive amino acids, and more preferably at least about 600 consecutive amino acids, and more preferably at least about 700 consecutive amino acids, and more preferably at least about 800 consecutive amino acids, and more preferably at least about 900 consecutive amino acids, and more preferably at least about 1000 consecutive amino acids of any of the amino acid sequence of the reference protein.

[0222] In a preferred embodiment of the present invention, an isolated protein or domain of the present invention comprises, consists essentially of, or consists of, any of the amino acid sequences described in any of U.S. Pat. No. 6,566,583; Metz et al., Science 293:290-293 (2001); U.S. Patent Application Publication No. 20020194641; U.S. Patent Application Publication No. 20040235127; and U.S. Patent Application Publication No. 20050100995, PCT Publication No. WO 2006/135866, or any biologically active homologues, fragments or domains thereof.

[0223] In another embodiment of the invention, an amino acid sequence having the biological activity of at least one domain of a PUFA PKS system of the present invention includes an amino acid sequence that is sufficiently similar to a naturally occurring PUFA PKS protein or polypeptide that is specifically described herein that a nucleic acid sequence encoding the amino acid sequence is capable of hybridizing under moderate, high, or very high stringency conditions (described below) to (i.e., with) a nucleic acid molecule encoding the naturally occurring PUFA PKS protein or polypeptide (i.e., to the complement of the nucleic acid strand encoding the naturally occurring PUFA PKS protein or polypeptide). Preferably, an amino acid sequence having the biological activity of at least one domain of a PUFA PKS system of the present invention is encoded by a nucleic acid sequence that hybridizes under moderate, high or very high stringency conditions to the complement of a nucleic acid sequence that encodes any of the above-described amino acid sequences for a PUFA PKS protein or domain. Methods to deduce a complementary sequence are known to those skilled in the art. It should be noted that since amino acid sequencing and nucleic acid sequencing technologies are not entirely error-free, the sequences presented herein, at best, represent apparent sequences of PUFA PKS domains and proteins of the present invention.

[0224] As used herein, hybridization conditions refer to standard hybridization conditions under which nucleic acid molecules are used to identify similar nucleic acid molecules. Such standard conditions are disclosed, for example, in Sambrook et al., Molecular Cloning: A Laboratory Manual, Cold Spring Harbor Labs Press (1989). Sambrook et al., ibid., is incorporated by reference herein in its entirety (see specifically, pages 9.31-9.62). In addition, formulae to calculate the appropriate hybridization and wash conditions to achieve hybridization permitting varying degrees of mismatch of nucleotides are disclosed, for example, in Meinkoth et al., Anal. Biochem. 138, 267 (1984); Meinkoth et al., ibid., is incorporated by reference herein in its entirety.

[0225] More particularly, moderate stringency hybridization and washing conditions, as referred to herein, refer to conditions which permit isolation of nucleic acid molecules having at least about 70% nucleic acid sequence identity with the nucleic acid molecule being used to probe in the hybridization reaction (i.e., conditions permitting about 30% or less mismatch of nucleotides). High stringency hybridization and washing conditions, as referred to herein, refer to conditions which permit isolation of nucleic acid molecules having at least about 80% nucleic acid sequence identity with the nucleic acid molecule being used to probe in the hybridization reaction (i.e., conditions permitting about 20% or less mismatch of nucleotides). Very high stringency hybridization and washing conditions, as referred to herein, refer to conditions which permit isolation of nucleic acid molecules having at least about 90% nucleic acid sequence identity with the nucleic acid molecule being used to probe in the hybridization reaction (i.e., conditions permitting about 10% or less mismatch of nucleotides). As discussed above, one of skill in the art can use the formulae in Meinkoth et al., ibid. to calculate the appropriate hybridization and wash conditions to achieve these particular levels of nucleotide mismatch. Such conditions will vary, depending on whether DNA:RNA or DNA:DNA hybrids are being formed. Calculated melting temperatures for DNA:DNA hybrids are 10° C. less than for DNA:RNA hybrids. In particular embodiments, stringent hybridization conditions for DNA:DNA hybrids include hybridization at an ionic strength of 6×SSC (0.9 M Na⁺) at a temperature of between about 20° C. and about 35° C. (lower stringency), more preferably, between about 28° C. and about 40° C. (more stringent), and even more preferably, between about 35° C. and about 45° C. (even more stringent), with appropriate wash conditions. In particular embodiments, stringent hybridization conditions for DNA:RNA hybrids include hybridization at an ionic strength of 6×SSC (0.9 M Na⁺) at a temperature of between about 30° C. and about 45° C., more preferably, between about 38° C. and about 50° C., and even more preferably, between about 45° C. and about 55° C., with similarly stringent wash conditions. These values are based on calculations of a melting temperature for molecules larger than about 100 nucleotides, 0% formamide and a G+C content of about 40%. Alternatively, Tₘ can be calculated empirically as set forth in Sambrook et al., supra, pages 9.31 to 9.62. In general, the wash conditions should be as stringent as possible, and should be appropriate for the chosen hybridization conditions. For example, hybridization conditions can include a combination of salt and temperature conditions that are approximately 20-25° C. below the calculated Tₘ of a particular hybrid, and wash conditions typically include a combination of salt and temperature conditions that are approximately 12-20° C. below the calculated Tₘ of the particular hybrid. One example of hybridization conditions suitable for use with DNA:DNA hybrids includes a 2-24 hour hybridization in 6×SSC (50% formamide) at about 42° C., followed by washing steps that include one or more washes at room temperature in about 2×SSC, followed by additional washes at higher temperatures and lower ionic strength (e.g., at least one wash as about 37° C. in about 0.1×-0.5×SSC, followed by at least one wash at about 68° C. in about 0.1×-0.5×SSC).

[0226] The present invention also includes a fusion protein that includes any PUFA PKS protein or domain or any homologue or fragment thereof attached to one or more fusion segments. Suitable fusion segments for use with the present invention include, but are not limited to, segments that can: enhance a protein's stability; provide other desirable biological activity; and/or assist with the purification of the protein (e.g., by affinity chromatography). A suitable fusion segment can be a domain of any size that has the desired function (e.g., imparts increased stability, solubility, biological activity; and/or simplifies purification of a protein). Fusion segments can be joined to amino and/or carboxyl termini of the protein and can be susceptible to cleavage in order to enable straight-forward recovery of the desired protein. Fusion proteins are preferably produced by culturing a recombinant cell transfected with a fusion nucleic acid molecule that encodes a protein including the fusion segment attached to either the carboxyl and/or amino terminal end of the protein of the invention as discussed above.

[0227] In one embodiment of the present invention, any of the above-described PUFA PKS amino acid sequences, as well as homologues of such sequences, can be produced with from at least one, and up to about 20, additional heterologous amino acids flanking each of the C- and/or N-terminal end of the given amino acid sequence. The resulting protein or polypeptide can be referred to as “consisting essentially of” a given amino acid sequence. According to the present invention, the heterologous amino acids are a sequence of amino acids that are not naturally found (i.e., not found in nature, in vivo) flanking the given amino acid sequence or which would not be encoded by the nucleotides that flank the naturally occurring nucleic acid sequence encoding the given amino acid sequence as it occurs in the gene, if such nucleotides in the naturally occurring sequence were translated using standard codon usage for the organism from which the given amino acid sequence is derived. Similarly, the phrase “consisting essentially of”, when used with reference to a nucleic acid sequence herein, refers to a nucleic acid sequence encoding a given amino acid sequence that can be flanked by from at least one, and up to as many as about 60, additional heterologous nucleotides at each of the 5′ and/or the 3′ end of the nucleic acid sequence encoding the given amino acid sequence. The heterologous nucleotides are not naturally found (i.e., not found in nature, in vivo) flanking the nucleic acid sequence encoding the given amino acid sequence as it occurs in the natural gene.

[0228] The minimum size of a protein or domain and/or a homologue or fragment thereof of the present invention is, in one aspect, a size sufficient to have the requisite biological activity, or sufficient to serve as an antigen for the generation of an antibody or as a target in an in vitro assay. In one embodiment, a protein of the present invention is at least about 8 amino acids in length (e.g., suitable for an antibody epitope or as a detectable peptide in an assay), or at least about 25 amino acids in length, or at least about 50 amino acids in length, or at least about 100 amino acids in length, or at least about 150 amino acids in length, or at least about 200 amino acids in length, or at least about 250 amino acids in length, or at least about 300 amino acids in length, or at least about 350 amino acids in length, or at least about 400 amino acids in length, or at least about 450 amino acids in length, or at least about 500 amino acids in length, and so on, in any length between 8 amino acids and up to the full length of a protein or domain of the invention or longer, in whole integers (e.g., 8, 9, 10, . . . 25, 26, . . . 500, 501, . . . ). There is no limit, other than a practical limit, on the maximum size of such a protein in that the protein can include a portion of a PUFA PKS protein, domain, or biologically active or useful fragment thereof, or a full-length PUFA PKS protein or domain, plus additional sequence (e.g., a fusion protein sequence), if desired.

[0229] One embodiment of the present invention relates to isolated nucleic acid molecules comprising, consisting essentially of, or consisting of nucleic acid sequences that encode any of the PUFA PKS proteins or domains described herein, including a homologue or fragment of any of such proteins or domains, as well as nucleic acid sequences that are fully complementary thereto. In accordance with the present invention, an isolated nucleic acid molecule is a nucleic acid molecule that has been removed from its natural milieu (i.e., that has been subject to human manipulation), its natural milieu being the genome or chromosome in which the nucleic acid molecule is found in nature. As such, “isolated” does not necessarily reflect the extent to which the nucleic acid molecule has been purified, but indicates that the molecule does not include an entire genome or an entire chromosome in which the nucleic acid molecule is found in nature. An isolated nucleic acid molecule can include a gene. An isolated nucleic acid molecule that includes a gene is not a fragment of a chromosome that includes such gene, but rather includes the coding region and regulatory regions associated with the gene, but no additional genes that are naturally found on the same chromosome, with the exception of other genes that encode other proteins of the PUFA PKS system as described herein. An isolated nucleic acid molecule can also include a specified nucleic acid sequence flanked by (i.e., at the 5′ and/or the 3′ end of the sequence) additional nucleic acids that do not normally flank the specified nucleic acid sequence in nature (i.e., heterologous sequences). Isolated nucleic acid molecule can include DNA, RNA (e.g., mRNA), or derivatives of either DNA or RNA (e.g., cDNA). Although the phrase “nucleic acid molecule” primarily refers to the physical nucleic acid molecule and the phrase “nucleic acid sequence” primarily refers to the sequence of nucleotides on the nucleic acid molecule, the two phrases can be used interchangeably, especially with respect to a nucleic acid molecule, or a nucleic acid sequence, being capable of encoding a protein or domain of a protein.

[0230] Preferably, an isolated nucleic acid molecule of the present invention is produced using recombinant DNA technology (e.g., polymerase chain reaction (PCR) amplification, cloning) or chemical synthesis. Isolated nucleic acid molecules include natural nucleic acid molecules and homologues thereof, including, but not limited to, natural allelic variants and modified nucleic acid molecules in which nucleotides have been inserted, deleted, substituted, and/or inverted in such a manner that such modifications provide the desired effect on PUFA PKS system biological activity as described herein. Protein homologues (e.g., proteins encoded by nucleic acid homologues) have been discussed in detail above.

[0231] A nucleic acid molecule homologue can be produced using a number of methods known to those skilled in the art (see, for example, Sambrook et al., Molecular Cloning: A Laboratory Manual, Cold Spring Harbor Labs Press (1989)). For example, nucleic acid molecules can be modified using a variety of techniques including, but not limited to, classic mutagenesis techniques and recombinant DNA techniques, such as site-directed mutagenesis, chemical treatment of a nucleic acid molecule to induce mutations, restriction enzyme cleavage of a nucleic acid fragment, ligation of nucleic acid fragments, PCR amplification and/or mutagenesis of selected regions of a nucleic acid sequence, synthesis of oligonucleotide mixtures and ligation of mixture groups to “build” a mixture of nucleic acid molecules and combinations thereof. Nucleic acid molecule homologues can be selected from a mixture of modified nucleic acids by screening for the function of the protein encoded by the nucleic acid and/or by hybridization with a wild-type gene.

[0232] The minimum size of a nucleic acid molecule of the present invention is a size sufficient to form a probe or oligonucleotide primer that is capable of forming a stable hybrid (e.g., under moderate, high or very high stringency conditions) with the complementary sequence of a nucleic acid molecule of the present invention, or of a size sufficient to encode an amino acid sequence having a biological activity of at least one domain of a PUFA PKS system according to the present invention. As such, the size of the nucleic acid molecule encoding such a protein can be dependent on nucleic acid composition and percent homology or identity between the nucleic acid molecule and complementary sequence as well as upon hybridization conditions per se (e.g., temperature, salt concentration, and formamide concentration). The minimal size of a nucleic acid molecule that is used as an oligonucleotide primer or as a probe is typically at least about 12 to about 15 nucleotides in length if the nucleic acid molecules are GC-rich and at least about 15 to about 18 bases in length if they are AT-rich. There is no limit, other than a practical limit, on the maximal size of a nucleic acid molecule of the present invention, in that the nucleic acid molecule can include a sequence sufficient to encode a biologically active fragment of a domain of a PUFA PKS system, an entire domain of a PUFA PKS system, several domains within an open reading frame (Orf) of a PUFA PKS system, an entire single- or multi-domain protein of a PUFA PKS system, or more than one protein of a PUFA PKS system.

[0233] Another embodiment of the present invention includes a recombinant nucleic acid molecule comprising a recombinant vector and a nucleic acid sequence encoding protein or peptide having a biological activity of at least one domain (or homologue or fragment thereof) of a PUFA PKS protein as described herein. Such nucleic acid sequences are described in detail above. According to the present invention, a recombinant vector is an engineered (i.e., artificially produced) nucleic acid molecule that is used as a tool for manipulating a nucleic acid sequence of choice and for introducing such a nucleic acid sequence into a host cell. The recombinant vector is therefore suitable for use in cloning, sequencing, and/or otherwise manipulating the nucleic acid sequence of choice, such as by expressing and/or delivering the nucleic acid sequence of choice into a host cell to form a recombinant cell. Such a vector typically contains heterologous nucleic acid sequences, that is nucleic acid sequences that are not naturally found adjacent to nucleic acid sequence to be cloned or delivered, although the vector can also contain regulatory nucleic acid sequences (e.g., promoters, untranslated regions) which are naturally found adjacent to nucleic acid molecules of the present invention or which are useful for expression of the nucleic acid molecules of the present invention (discussed in detail below). The vector can be either RNA or DNA, either prokaryotic or eukaryotic, and typically is a plasmid. The vector can be maintained as an extrachromosomal element (e.g., a plasmid) or it can be integrated into the chromosome of a recombinant organism (e.g., a microbe or a plant). The entire vector can remain in place within a host cell, or under certain conditions, the plasmid DNA can be deleted, leaving behind the nucleic acid molecule of the present invention. The integrated nucleic acid molecule can be under chromosomal promoter control, under native or plasmid promoter control, or under a combination of several promoter controls. Single or multiple copies of the nucleic acid molecule can be integrated into the chromosome. A recombinant vector of the present invention can contain at least one selectable marker.

[0234] In one embodiment, a recombinant vector used in a recombinant nucleic acid molecule of the present invention is an expression vector. As used herein, the phrase “expression vector” is used to refer to a vector that is suitable for production of an encoded product (e.g., a protein of interest). In this embodiment, a nucleic acid sequence encoding the product to be produced (e.g., a PUFA PKS domain or protein) is inserted into the recombinant vector to produce a recombinant nucleic acid molecule. The nucleic acid sequence encoding the protein to be produced is inserted into the vector in a manner that operatively links the nucleic acid sequence to regulatory sequences in the vector that enable the transcription and translation of the nucleic acid sequence within the recombinant host cell.

[0235] In another embodiment, a recombinant vector used in a recombinant nucleic acid molecule of the present invention is a targeting vector. As used herein, the phrase “targeting vector” is used to refer to a vector that is used to deliver a particular nucleic acid molecule into a recombinant host cell, wherein the nucleic acid molecule is used to delete, inactivate, or replace an endogenous gene or portion of a gene within the host cell or microorganism (i.e., used for targeted gene disruption or knock-out technology). Such a vector may also be known in the art as a “knock-out” vector. In one aspect of this embodiment, a portion of the vector, but more typically, the nucleic acid molecule inserted into the vector (i.e., the insert), has a nucleic acid sequence that is homologous to a nucleic acid sequence of a target gene in the host cell (i.e., a gene which is targeted to be deleted or inactivated). The nucleic acid sequence of the vector insert is designed to associate with the target gene such that the target gene and the insert may undergo homologous recombination, whereby the endogenous target gene is deleted, inactivated, attenuated (i.e., by at least a portion of the endogenous target gene being mutated or deleted), or replaced. The use of this type of recombinant vector to replace an endogenous Schizochytrium gene, for example, with a recombinant gene has been described (see, e.g., U.S. Patent Application Publication No. 20050100995), and the general technique for genetic transformation of Thraustochytrids is described in detail in U.S. Patent Application Publication No. 20030166207, published Sep. 4, 2003. Genetic transformation techniques for plants are well-known in the art. It is an embodiment of the present invention that the marine bacterial genes described herein can be used to transform plants alone or in conjunction with the PUFA PKS from thraustochytrids to improve and/or alter (modify, change) the PUFA PKS production capabilities of such plants.

[0236] Typically, a recombinant nucleic acid molecule includes at least one nucleic acid molecule of the present invention operatively linked to one or more expression control sequences. As used herein, the phrase “recombinant molecule” or “recombinant nucleic acid molecule” primarily refers to a nucleic acid molecule or nucleic acid sequence operatively linked to a expression control sequence, but can be used interchangeably with the phrase “nucleic acid molecule”, when such nucleic acid molecule is a recombinant molecule as discussed herein. According to the present invention, the phrase “operatively linked” refers to linking a nucleic acid molecule to an expression control sequence (e.g., a transcription control sequence and/or a translation control sequence) in a manner such that the molecule can be expressed when transfected (i.e., transformed, transduced, transfected, conjugated or conduced) into a host cell. Transcription control sequences are sequences that control the initiation, elongation, or termination of transcription. Particularly important transcription control sequences are those that control transcription initiation, such as promoter, enhancer, operator and repressor sequences. Suitable transcription control sequences include any transcription control sequence that can function in a host cell or organism into which the recombinant nucleic acid molecule is to be introduced.

[0237] Recombinant nucleic acid molecules of the present invention can also contain additional regulatory sequences, such as translation regulatory sequences, origins of replication, and other regulatory sequences that are compatible with the recombinant cell. In one embodiment, a recombinant molecule of the present invention, including those that are integrated into the host cell chromosome, also contains secretory signals (i.e., signal segment nucleic acid sequences) to enable an expressed protein to be secreted from the cell that produces the protein. Suitable signal segments include a signal segment that is naturally associated with the protein to be expressed or any heterologous signal segment capable of directing the secretion of the protein according to the present invention. In another embodiment, a recombinant molecule of the present invention comprises a leader sequence to enable an expressed protein to be delivered to and inserted into the membrane of a host cell. Suitable leader sequences include a leader sequence that is naturally associated with the protein, or any heterologous leader sequence capable of directing the delivery and insertion of the protein to the membrane of a cell.

[0238] One or more recombinant molecules of the present invention can be used to produce an encoded product (e.g., a PUFA PKS domain, protein, or system) of the present invention. In one embodiment, an encoded product is produced by expressing a nucleic acid molecule as described herein under conditions effective to produce the protein. A preferred method to produce an encoded protein is by transfecting a host cell with one or more recombinant molecules to form a recombinant cell. Suitable host cells to transfect include, but are not limited to, any bacterial, fungal (e.g., yeast), insect, plant or animal cell that can be transfected. In one embodiment of the invention, a preferred host cell is a plant host cell. Host cells can be either untransfected cells or cells that are already transfected with at least one other recombinant nucleic acid molecule.

[0239] According to the present invention, the term “transfection” is used to refer to any method by which an exogenous nucleic acid molecule (i.e., a recombinant nucleic acid molecule) can be inserted into a cell. The term “transformation” can be used interchangeably with the term “transfection” when such term is used to refer to the introduction of nucleic acid molecules into microbial cells, such as algae, bacteria and yeast, or into plant cells. In microbial and plant systems, the term “transformation” is used to describe an inherited change due to the acquisition of exogenous nucleic acids by the microorganism or plant and is essentially synonymous with the term “transfection.” However, in animal cells, transformation has acquired a second meaning which can refer to changes in the growth properties of cells in culture after they become cancerous, for example. Therefore, to avoid confusion, the term “transfection” is preferably used with regard to the introduction of exogenous nucleic acids into animal cells, and the term “transfection” will be used herein to generally encompass transfection of animal cells, and transformation of microbial cells or plant cells, to the extent that the terms pertain to the introduction of exogenous nucleic acids into a cell. Therefore, transfection techniques include, but are not limited to, transformation, particle bombardment, diffusion, active transport, bath sonication, electroporation, microinjection, lipofection, adsorption, infection and protoplast fusion.

[0240] It will be appreciated by one skilled in the art that use of recombinant DNA technologies can improve control of expression of transfected nucleic acid molecules by manipulating, for example, the number of copies of the nucleic acid molecules within the host cell, the efficiency with which those nucleic acid molecules are transcribed, the efficiency with which the resultant transcripts are translated, and the efficiency of post-translational modifications. Additionally, the promoter sequence might be genetically engineered to improve the level of expression as compared to the native promoter. Recombinant techniques useful for controlling the expression of nucleic acid molecules include, but are not limited to, integration of the nucleic acid molecules into one or more host cell chromosomes, addition of vector stability sequences to plasmids, substitutions or modifications of transcription control signals (e.g., promoters, operators, enhancers), substitutions or modifications of translational control signals (e.g., ribosome binding sites, Shine-Dalgarno sequences), modification of nucleic acid molecules to correspond to the codon usage of the host cell, and deletion of sequences that destabilize transcripts.

[0241] According to the present invention, to affect an activity of a PUFA PKS system, such as to affect the PUFA production profile, includes any genetic modification in the PUFA PKS system or genes that interact with the PUFA PKS system that causes any detectable or measurable change or modification in any biological activity the PUFA PKS system expressed by the organism as compared to in the absence of the genetic modification. According to the present invention, the phrases “PUFA profile”, “PUFA expression profile” and “PUFA production profile” can be used interchangeably and describe the overall profile of PUFAs expressed/produced by a organism. The PUFA expression profile can include the types of PUFAs expressed by the organism, as well as the absolute and/or relative amounts of the PUFAs produced. Therefore, a PUFA profile can be described in terms of the ratios of PUFAs to one another as produced by the organism, in terms of the types of PUFAs produced by the organism, and/or in terms of the types and absolute and/or relative amounts of PUFAs produced by the organism.

[0242] The following examples are provided for the purpose of illustration and are not intended to limit the scope of the present invention.

### EXAMPLES

General Background Information for the Examples

[0243] Implications of the biochemistry of PUFA synthesis by the Schizochytrium PUFA synthase. In previous applications, the biochemical pathway for PUFA synthesis via the Schizochytrium and Schizochytrium-like PUFA synthases has been described. Some key points are: the carbons are derived from malonyl-CoA (acetyl-CoA may be used in a priming reaction), NAPDH is used as a reductant and the PUFAs are released as free fatty acids by an activity integral to the synthase enzyme itself. Here, the present inventor shows examples in which the PUFA synthase derived from Schizochytrium, along with a PPTase from Nostoc (HetI), are expressed in yeast and in Arabidopsis. The biochemical characteristics of the Schizochytrium PUFA synthase combined with a general knowledge of yeast and higher plant biochemistry suggested that expression of this system in the cytoplasm of yeast or plant cells as well as in plastids of plants should result in PUFA accumulation, and that is indeed what has been observed.

[0244] Co-expression of an appropriate PPTase. Previous work in which the Schizochytrium, as well as other PUFA synthases, were expressed in E. coli revealed that endogenous PPTases did not activate the PUFA synthase ACP domains. It was also demonstrated that a PPTase from Nostoc, HetI, could serve as an appropriate heterologous PPTase for activating those domains and that DHA and DPAn-6 (the primary products of the Schizochytrium PUFA synthase) could accumulate in the E. coli cells expressing both HetI and the synthase. The work shown here shows that when the Schizochytrium PUFA synthase is expressed in yeast or in the cytoplasm or plastids of plant cells, detection of DHA and DPAn-6 in those hosts is dependant on the co-expression of HetI (or any appropriate PPTase).

[0245] Modification of the Schizochytrium's PUFA synthase Orfs A and B for expression in yeast. As indicated in U.S. Patent Application Publication No. 20040235127, expression of the native form of the Schizochytrium Orf B gene in E. coli resulted in production of a truncated protein. A full-length protein product was detected after expression of a modified Orf in which an approximately 190 bp region that contained 15 adjacent identical serine codons (TCT) had been altered to better mimic codon usage in E. coli. This modified Orf B sequence is designated as Orf B*. Preliminary experiments indicated that expression of Orf A and Orf B* (SEQ ID NO:36) in yeast did not result in production of the expected proteins. Therefore, the Orfs were resynthesized for better expression in yeast. The resynthesized Orfs are designated sOrfA (SEQ ID NO:35) and sOrfB (SEQ ID NO:36). The proteins encoded by sOrfA and sOrf B have the same amino acid sequences as those encoded by the native Orf A (SEQ ID NO:2) and Orf B (SEQ ID NO:4), respectively. Similar strategies can be used to optimize codon usage for expression of the constructs in other heterologous organisms.

### Example 1

[0246] The following example shows the expression of genes encoding the Schizochytrium PUFA synthase (sOrf A, sOrfB and native Orf C) along with Het I in baker's yeast (Saccharomyces cerevisiae).

[0247] The Schizochytrium PUFA synthase genes and Het I were expressed in yeast using materials obtained from Invitrogen. The INVsc1 strain of Saccharomyces cerevisiae was used along with the following transformation vectors: pYESLeu (sOrfA, SEQ ID NO:35)), pYES3/CT (sOrfB, SEQ ID NO:36)), pYES2/CT (OrfC, SEQ ID NO:5) and pYESHis (HetI, SEQ ID NO:33). Some of the vectors were modified to accommodate specific cloning requirements. Appropriate selection media were used, depending on the particular experiment. The genes were cloned, in each case, behind a GAL1 promoter and expression was induced by re-suspension of washed cells in media containing galactose according to guidelines provide by Invitrogen. Cells were grown at 30° C. and harvested (by centrifugation) at the indicated times after being transferred to the induction medium. The cell pellets were freeze dried and FAMEs were prepared using acidic methanol, extracted into hexane and analyzed by GC.

[0248] FIG. 1 shows a comparison of the fatty acid profile from yeast cells expressing the Schizochytrium PUFA synthase system (sOrf A, sOrf B, Orf C and Het I) and one obtained from control cells (lacking the sOrf A gene). Cells were collected ˜20 hrs after induction. It can be seen that two novel FAME peaks have appeared it the profile of the strain expressing the complete PUFA synthase system. These two peaks were identified as DPA n-6 and DHA by comparison of the elution time with authentic standards and subsequently by MS analyses. As predicted from our characterization of the Schizochytrium PUFA synthase, aside from DHA and DPA n-6, no other novel peaks are evident in the profile. FIG. 2 shows the region of the GC chromatogram of FIG. 1 which contains the PUFA FAMEs. Both the control cells and the cell expressing the PUFA synthase contain a peak that elutes near the DHA FAME. This has been identified as C26:0 FAME and (based on literature references) is derived from sphingolipids. Although it elutes close to the DHA peak the resolution is sufficient so that it does not interfere with the quantitation of DHA. The DPA n-6 peak is well separated from other endogenous yeast lipids in the FAME profile. In this particular example, the cells expressing the Schizochytrium PUFA synthase system accumulated 2.4% DHA and 2.0% DPA n-6 (as a percentage of the total FAMEs). The sum of DHA and DPA n-6=4.4% of the measured fatty acids in the cells. The ratio of DHA to DPAn-6 observed in the cells was ˜1.2:1.

[0249] The results presented above showing expression of the Schizochytrium PUFA synthase in yeast provide a confirmation of the pathway proposed in the previous applications as well as the predictions in terms of the alterations to the fatty acid profiles that can be expected.

### Example 2

[0250] The following example describes the expression of genes encoding the Schizochytrium PUFA synthase (OrfA, OrfB* and OrfC) along with Het I in Arabidopsis and the production of the target PUFAs, DHA and DPAn-6, in the substantial absence of any detectable intermediates or side products.

[0251] The Schizochytrium OrfA (nucleotide sequence represented by SEQ ID NO:1), OrfB* (nucleotide sequence represented by SEQ ID NO:37) and OrfC (nucleotide sequence represented by SEQ ID NO:5) along with Het I (nucleotide sequence represented by SEQ ID NO:33) were cloned (separately or in various combinations including all 4 genes on one superconstruct) into the appropriate binary vectors for introduction of the genes into plants. Examples of such constructs and vectors are described below (three expression constructs) and also in Example 13 (one “superconstruct” for 4127).

[0252] Construction of 5720: Orf B* (Plastidic Expression)

[0253] The Orf B* (SEQ ID NO:37, encoding SEQ ID NO:4), was restriction cloned into an expression cassette under the control of the flax linin promoter/terminator (U.S. Pat. No. 6,777,591). The linin promoter controls the specific-temporal and tissue-specific expression of the transgene(s) during seed development. Directly upstream and in-frame of the Schizochytrium Orf B* was the plastid targeting sequence derived from Brassica napus acyl-ACP thioesterase (PT-signal peptide), to target Orf B* to the plastid. The plant binary vector also contained an existing E. coli phosphomannose isomerase gene (Miles and Guest, 1984, Gene 32: 41-48) driven by the ubiquitin promoter/terminator from Petroselinum crispum (Kawalleck et al., 1993, Plant Mol. Bio., 21:673-684) between the left and right border sequences for positive selection (Haldrup et al., 1998, Plant Mol. Biol. 37:287-296).

[0254] Construction of 4107: HetI and Orf C (Plastidic Expression)

[0255] The Schizochytrium Orf C (nucleotide sequence represented by SEQ ID NO:5, encoding SEQ ID NO:6) along with HetI (nucleotide sequence represented by SEQ ID NO:33, encoding SEQ ID NO:34) were cloned into expression cassettes under the control of a flax linin promoter/terminator (U.S. Pat. No. 6,777,591). The linin promoter controls the specific-temporal and tissue-specific expression of the transgene(s) during seed development. Directly upstream and in-frame of the Schizochytrium Orf C and HetI was the plastid targeting sequence (PT-signal peptide) derived from Brassica napus acyl-ACP thioesterase, to target the PUFA synthase and PPTase to the plastid. Both expression cassettes were then assembled into one plant binary vector containing a pat gene conferring host plant phosphinothricine resistance (Wohlleben et al., 1988, Gene 70:25-37) driven by the ubiquitin promoter/terminator from Petroselinum crispum (Kawalleck et al., 1993, Plant Mol. Bio., 21:673-684) between the left and right border sequences.

[0256] Construction of 4757: Orf A (Plastidic Expression)

[0257] The Schizochytrium Orf A (nucleotide sequence represented by SEQ ID NO:1, encoding SEQ ID NO:2) was cloned into expression cassettes under the control of a flax linin promoter/terminator (U.S. Pat. No. 6,777,591). The linin promoter controls the specific-temporal and tissue-specific expression of the transgene(s) during seed development. Directly upstream and in-frame of the Schizochytrium Orf A was the plastid targeting sequence derived from Brassica napus acyl-ACP thioesterase (PT-signal peptide), to target the PUFA synthase and PPTase to the plastid. The expression cassette was contained within a plant binary vector containing a nptII gene conferring host plant kanamycin resistance driven by the MAS promoter/terminator between the left and right border sequences.

[0258] In one example, transgenes were cloned into three separate expression cassettes: a construct denoted 5720 (containing OrfB*, encoding SEQ ID NO:4), a construct denoted 4107 (containing OrfC, encoding SEQ ID NO:6 and HetI, encoding SEQ ID NO:34) and a construct denoted 4757 (containing OrfA, containing SEQ ID NO:2), as described above. In each construct, the gene was cloned. For directing the proteins to the plastid, additional 5′ sequences encoding a plastid targeting sequence derived from a Brassica napus acyl-ACP thioesterase were located directly upstream of Orfs A, B*, C and HetI. The nucleotide sequences encoding this peptide were placed in-frame with the start methionine codons of each PUFA synthase Orf, as well as the engineered start codon (ATG) of Het I. In other constructs, where localization of the PUFA synthase was targeted to the cytoplasm of plant cells, no additional protein encoding sequences were appended to the 5′ end of the Orfs.

[0259] Standard methods were used for introduction of the genes into Arabidopsis (floral dipping into suspension of Agrobacterium strains containing the appropriate vectors, substantially as described in Clough et al., 1998, Plant J. 16: 735-743). Briefly, the integrity of all plant binary vectors were confirmed by diagnostic restriction digests and sequence analysis. Isolated plasmids were then used to transform competent Agrobacterium strain EH101 (Hood et al., 1986, J. Bacteriol. 144: 732-743) by electroporation (25 μF, 2.5 kV, 200Ω). Recombinant Agrobacterium were plated on AB-spectinomycin/kanamycin (20× AB salts, 2 M glucose, 0.25 mg/ml FeSo₄.7H₂O, 1 M MgSo₄, 1 M CaCl₂) and a single colony was used to inoculate 5 ml of AB-spectinomycin/kanamycin broth. These cultures were grown overnight at 28° C. The recombinant Agrobacteria containing the plasmids were then used to transform wild type C24 Arabidopsis thaliana plants by the flower dipping method (Clough et al., 1998, Plant J. 16: 735-743).

[0260] Seeds obtained from these plants were plated on selective medium. Positively identified seedlings were transferred to soil and taken to maturity, after which the seeds were analyzed for PUFA content. Based on PUFA content, some of those seeds were taken forward to the next generation. Pooled seeds obtained from those plants were analyzed for their fatty acid content. The target PUFAs expected from these transgenic plants were docosahexaenoic acid (DHA) and docosapentaenoic acid (DPAn-6), which are the primary PUFAs produced by the Schizochytrium PUFA PKS system from which the genes used to transform the plants were derived.

[0261] Results from one exemplary fatty acid analysis in one of the exemplary transgenic plant lines is shown in FIG. 3. The top panel of FIG. 3 shows the typical fatty acid profile of wild type Arabidopsis seeds as represented by GC separation and FID detection of FAMEs prepared from a pooled seed sample. The predominant fatty acids are: 16:0, 18:0, 16:1, 18:1, 20:1, 20:2 and 22:1. No DHA or DPA n-6 are present in the samples from wild type seed.

[0262] The lower panel of FIG. 3 shows the fatty acid profile of a pooled seed sample from one of the exemplary transgenic Arabidopsis lines (line 263) expressing the Schizochytrium PUFA synthase genes and the Het I gene, introduced from three separate expression cassettes (5720, 4107 and 4757) all targeted to the plastid, as described above. Referring to the fatty acid profile of Line 263, it is readily observed that two FAME peaks are present in the profile from the transgenic plant seeds that are not present in the profile from wild type seeds. The elution pattern of these two peaks exactly corresponds to the elution of authentic DHA and DPAn-6 (using FAMEs prepared from Schizochytrium oil as standards, as well as a commercially purchased DHA standard from NuCheck Prep). In this particular example, the DHA peak represents 0.8% of total calculated FAMEs while the DPA n-6 peak represents 1.7%. The sum of novel PUFAs is 2.5% of total FAMEs.

[0263] Experiments with other transgenic plant lines yielded similar results. For example, another transgenic line, denoted 269, which was transformed with the same constructs and in the same manner as the 263 line, produced approximately 0.75% DHA or total calculated FAMEs, and 1.41% DPAn-6 of total calculated FAMEs) (data not shown).

[0264] Moreover, multiple other transgenic Arabidopsis plants produced using the same nucleic acid molecules described above also produced the target PUFAs, regardless of whether they were produced using constructs providing the PUFA PKS genes and the HetI PPTase on separate constructs, combination constructs, or a single superconstruct.

[0265] In addition, transgenic plants targeting the PUFA PKS genes to the cytosol all expressed the target PUFAs (data not shown in detail). For example, a plant line expressing the Schizochytrium PUFA PKS plus HetI in the cytosol introduced on three separate expression cassettes as described above (without the plastid targeting sequence) produced approximately 0.45% DHA and approximately 0.8% DPA as a percentage of total FAME. In another example, a plant line expressing the Schizochytrium PUFA PKS plus HetI in the cytosol introduced on a single superconstruct produced approximately 0.2-0.3% DHA and approximately 0.5% DPA as a percentage of total FAME.

[0266] The appearance of DHA and DPAn-6 in the seed fatty acid profile shown in FIG. 3 (and in the other similar transgenic plant seeds) demonstrates that introduced Schizochytrium PUFA synthase system functions when expressed in the plant cell and that the proteins can be targeted to the plastid or to the cytosol. As predicted from the previous biochemical and heterologous expression data (in E. coli and in yeast) the only novel fatty acids detected in the profile of the seed from the transgenic plants are DHA and DPA n-6, further illustrating the advantages of the PUFA PKS system over the standard pathway enzymes for the production of PUFAs in a plant.

[0267] This application incorporates by reference in its entirety the following patents, application publications, and publications: U.S. Pat. No. 6,566,583; Metz et al., Science 293:290-293 (2001); U.S. Patent Application Publication No. 20020194641; U.S. Patent Application Publication No. 20040235127; U.S. Patent Application Publication No. 20050100995, and PCT Publication No. WO 2006/135866.

[0268] Each publication cited or discussed herein is incorporated herein by reference in its entirety.

[0269] While various embodiments of the present invention have been described in detail, it is apparent that modifications and adaptations of those embodiments will occur to those skilled in the art. It is to be expressly understood, however, that such modifications and adaptations are within the scope of the present invention, as set forth in the following claims.

The application's sequence listing, which the Patent Office published only in electronic form, follows.

SEQUENCE LISTING (80 sequences)

SEQ ID NO: 1 - DNA, 8733 bp, Schizochytrium sp.
  CDS (1)..(8733)
atggcggcccgtctgcaggagcaaaagggaggcgagatggatacccgcattgccatcatcggcatgtcggccatcctcccctgcggcacgaccgtgcgcgagtcgtgggagaccatccgcgccggcatcgactgcctgtcggatctccccgaggaccgcgtcgacgtgacggcgtactttgaccccgtcaagaccaccaaggacaagatctactgcaagcgcggtggcttcattcccgagtacgactttgacgcccgcgagttcggactcaacatgttccagatggaggactcggacgcaaaccagaccatctcgcttctcaaggtcaaggaggccctccaggacgccggcatcgacgccctcggcaaggaaaagaagaacatcggctgcgtgctcggcattggcggcggccaaaagtccagccacgagttctactcgcgccttaattatgttgtcgtggagaaggtcctccgcaagatgggcatgcccgaggaggacgtcaaggtcgccgtcgaaaagtacaaggccaacttccccgagtggcgcctcgactccttccctggcttcctcggcaacgtcaccgccggtcgctgcaccaacaccttcaacctcgacggcatgaactgcgttgtcgacgccgcatgcgcctcgtccctcatcgccgtcaaggtcgccatcgacgagctgctctacggtgactgcgacatgatggtcaccggtgccacctgcacggataactccatcggcatgtacatggccttctccaagacccccgtgttctccacggaccccagcgtgcgcgcctacgacgaaaagacaaagggcatgctcatcggcgagggctccgccatgctcgtcctcaagcgctacgccgacgccgtccgcgacggcgatgagatccacgctgttattcgcggctgcgcctcctccagtgatggcaaggccgccggcatctacacgcccaccatttcgggccaggaggaggccctccgccgcgcctacaaccgcgcctgtgtcgacccggccaccgtcactctcgtcgagggtcacggcaccggtactcccgttggcgaccgcatcgagctcaccgccttgcgcaacctctttgacaaggcctacggcgagggcaacaccgaaaaggtcgctgtgggcagcatcaagtccagcatcggccatctcaaggccgtcgccggtctcgccggtatgatcaaggtcatcatggcgctcaagcacaagactctcccgggcaccatcaacgtcgacaacccacccaacctctacgacaacacgcccatcaacgagtcctcgctctacattaacaccatgaaccgcccctggttcccgccccctggtgtgccccgccgcgccggcatttcgagctttggctttggtggcgccaactaccacgccgtcctcgaggaggccgagcccgagcacacgaccgcgtaccgcctcaacaagcgcccgcagcccgtgctcatgatggccgccacgcccgcggccctccagtcgctctgcgaggcccagctcaaggagttcgaggccgccatcaaggagaacgagaccgtcaagaacaccgcctacatcaagtgcgtcaagttcggcgagcagttcaaattccctggctccatcccggccacaaacgcgcgcctcggcttcctcgtcaaggatgctgaggatgcctgctccaccctccgtgccatctgcgcccaattcgccaaggatgtcaccaaggaggcctggcgcctcccccgcgagggcgtcagcttccgcgccaagggcatcgccaccaacggcgctgtcgccgcgctcttctccggccagggcgcgcagtacacgcacatgtttagcgaggtggccatgaactggccccagttccgccagagcattgccgccatggacgccgcccagtccaaggtcgctggaagcgacaaggactttgagcgcgtctcccaggtcctctacccgcgcaagccgtacgagcgtgagcccgagcaggaccacaagaagatctccctcaccgcctactcgcagccctcgaccctggcctgcgctctcggtgcctttgagatcttcaaggaggccggcttcaccccggactttgccgccggccattcgctcggtgagttcgccgccctctacgccgcgggctgcgtcgaccgcgacgagctctttgagcttgtctgccgccgcgcccgcatcatgggcggcaaggacgcaccggccacccccaagggctgcatggccgccgtcattggccccaacgccgagaacatcaaggtccaggccgccaacgtctggctcggcaactccaactcgccttcgcagaccgtcatcaccggctccgtcgaaggtatccaggccgagagcgcccgcctccagaaggagggcttccgcgtcgtgcctcttgcctgcgagagcgccttccactcgccccagatggagaacgcctcgtcggccttcaaggacgtcatctccaaggtctccttccgcacccccaaggccgagaccaagctcttcagcaacgtctctggcgagacctaccccacggacgcccgcgagatgcttacgcagcacatgaccagcagcgtcaagttcctcacccaggtccgcaacatgcaccaggccggtgcgcgcatctttgtcgagttcggacccaagcaggtgctctccaagcttgtctccgagaccctcaaggatgacccctcggttgtcaccgtctctgtcaacccggcctcgggcacggattcggacatccagctccgcgacgcggccgtccagctcgttgtcgctggcgtcaaccttcagggctttgacaagtgggacgcccccgatgccacccgcatgcaggccatcaagaagaagcgcactaccctccgcctttcggccgccacctacgtctcggacaagaccaagaaggtccgcgacgccgccatgaacgatggccgctgcgtcacctacctcaagggcgccgcaccgctcatcaaggccccggagcccgttgtcgacgaggccgccaagcgcgaggccgagcgtctccagaaggagcttcaggatgcccagcgccagctcgacgacgccaagcgcgccgccgccgaggccaactccaagctcgccgctgccaaggaggaggccaagaccgccgctgcttcggccaagcccgcagttgacactgctgttgtcgaaaagcatcgtgccatcctcaagtccatgctcgcggagctcgatggctacggatcggtcgacgcttcttccctccagcagcagcagcagcagcagacggcccccgccccggtcaaggctgctgcgcctgccgcccccgttgcctcggcccctgccccggctgtctcgaacgagcttcttgagaaggccgagactgtcgtcatggaggtcctcgccgccaagaccggctacgagaccgacatgatcgaggctgacatggagctcgagaccgagctcggcattgactccatcaagcgtgtcgagatcctctccgaggtccaggccatgctcaatgtcgaggccaaggatgtcgatgccctcagccgcactcgcactgttggtgaggttgtcaacgccatgaaggccgagatcgctggcagctctgccccggcgcctgctgccgctgctccggctccggccaaggctgcccctgccgccgctgcgcctgctgtctcgaacgagcttctcgagaaggccgagaccgtcgtcatggaggtcctcgccgccaagactggctacgagactgacatgatcgagtccgacatggagctcgagactgagctcggcattgactccatcaagcgtgtcgagatcctctccgaggttcaggccatgctcaacgtcgaggccaaggacgtcgacgctctcagccgcactcgcactgtgggtgaggtcgtcaacgccatgaaggctgagatcgctggtggctctgccccggcgcctgccgccgctgccccaggtccggctgctgccgcccctgcgcctgccgccgccgcccctgctgtctcgaacgagcttcttgagaaggccgagaccgtcgtcatggaggtcctcgccgccaagactggctacgagactgacatgatcgagtccgacatggagctcgagaccgagctcggcattgactccatcaagcgtgtcgagattctctccgaggtccaggccatgctcaacgtcgaggccaaggacgtcgacgctctcagccgcacccgcactgttggcgaggtcgtcgatgccatgaaggccgagatcgctggtggctctgccccggcgcctgccgccgctgctcctgctccggctgctgccgcccctgcgcctgccgcccctgcgcctgctgtctcgagcgagcttctcgagaaggccgagactgtcgtcatggaggtcctcgccgccaagactggctacgagactgacatgatcgagtccgacatggagctcgagaccgagctcggcattgactccatcaagcgtgtcgagattctctccgaggtccaggccatgctcaacgtcgaggccaaggacgtcgacgctctcagccgcacccgcactgttggcgaggtcgtcgatgccatgaaggccgagatcgctggtggctctgccccggcgcctgccgccgctgctcctgctccggctgctgccgcccctgcgcctgccgcccctgcgcctgccgcccctgcgcctgctgtctcgagcgagcttctcgagaaggccgagactgtcgtcatggaggtcctcgccgccaagactggctacgagactgacatgattgagtccgacatggagctcgagaccgagctcggcattgactccatcaagcgtgtcgagattctctccgaggttcaggccatgctcaacgtcgaggccaaggacgtcgacgctctcagccgcactcgcactgttggtgaggtcgtcgatgccatgaaggctgagatcgctggcagctccgcctcggcgcctgccgccgctgctcctgctccggctgctgccgctcctgcgcccgctgccgccgcccctgctgtctcgaacgagcttctcgagaaagccgagactgtcgtcatggaggtcctcgccgccaagactggctacgagactgacatgatcgagtccgacatggagctcgagactgagctcggcattgactccatcaagcgtgtcgagatcctctccgaggttcaggccatgctcaacgtcgaggccaaggacgtcgatgccctcagccgcacccgcactgttggcgaggttgtcgatgccatgaaggccgagatcgctggtggctctgccccggcgcctgccgccgctgcccctgctccggctgccgccgcccctgctgtctcgaacgagcttctcgagaaggccgagactgtcgtcatggaggtcctcgccgccaagactggctacgagaccgacatgatcgagtccgacatggagctcgagaccgagctcggcattgactccatcaagcgtgtcgagattctctccgaggttcaggccatgctcaacgtcgaggccaaggacgtcgatgctctcagccgcactcgcactgttggcgaggtcgtcgatgccatgaaggctgagatcgccggcagctccgccccggcgcctgccgccgctgctcctgctccggctgctgccgctcctgcgcccgctgccgctgcccctgctgtctcgagcgagcttctcgagaaggccgagaccgtcgtcatggaggtcctcgccgccaagactggctacgagactgacatgattgagtccgacatggagctcgagactgagctcggcattgactccatcaagcgtgtcgagatcctctccgaggttcaggccatgctcaacgtcgaggccaaggacgtcgatgccctcagccgcacccgcactgttggcgaggttgtcgatgccatgaaggccgagatcgctggtggctctgccccggcgcctgccgccgctgcccctgctccggctgccgccgcccctgctgtctcgaacgagcttcttgagaaggccgagaccgtcgtcatggaggtcctcgccgccaagactggctacgagaccgacatgatcgagtccgacatggagctcgagaccgagctcggcattgactccatcaagcgtgtcgagattctctccgaggttcaggccatgctcaacgtcgaggccaaggacgtcgacgctctcagccgcactcgcactgttggcgaggtcgtcgatgccatgaaggctgagatcgctggtggctctgccccggcgcctgccgccgctgctcctgcctcggctggcgccgcgcctgcggtcaagattgactcggtccacggcgctgactgtgatgatctttccctgatgcacgccaaggtggttgacatccgccgcccggacgagctcatcctggagcgccccgagaaccgccccgttctcgttgtcgatgacggcagcgagctcaccctcgccctggtccgcgtcctcggcgcctgcgccgttgtcctgacctttgagggtctccagctcgctcagcgcgctggtgccgctgccatccgccacgtgctcgccaaggatctttccgcggagagcgccgagaaggccatcaaggaggccgagcagcgctttggcgctctcggcggcttcatctcgcagcaggcggagcgcttcgagcccgccgaaatcctcggcttcacgctcatgtgcgccaagttcgccaaggcttccctctgcacggctgtggctggcggccgcccggcctttatcggtgtggcgcgccttgacggccgcctcggattcacttcgcagggcacttctgacgcgctcaagcgtgcccagcgtggtgccatctttggcctctgcaagaccatcggcctcgagtggtccgagtctgacgtcttttcccgcggcgtggacattgctcagggcatgcaccccgaggatgccgccgtggcgattgtgcgcgagatggcgtgcgctgacattcgcattcgcgaggtcggcattggcgcaaaccagcagcgctgcacgatccgtgccgccaagctcgagaccggcaacccgcagcgccagatcgccaaggacgacgtgctgctcgtttctggcggcgctcgcggcatcacgcctctttgcatccgggagatcacgcgccagatcgcgggcggcaagtacattctgcttggccgcagcaaggtctctgcgagcgaaccggcatggtgcgctggcatcactgacgagaaggctgtgcaaaaggctgctacccaggagctcaagcgcgcctttagcgctggcgagggccccaagcccacgccccgcgctgtcactaagcttgtgggctctgttcttggcgctcgcgaggtgcgcagctctattgctgcgattgaagcgctcggcggcaaggccatctactcgtcgtgcgacgtgaactctgccgccgacgtggccaaggccgtgcgcgatgccgagtcccagctcggtgcccgcgtctcgggcatcgttcatgcctcgggcgtgctccgcgaccgtctcatcgagaagaagctccccgacgagttcgacgccgtctttggcaccaaggtcaccggtctcgagaacctcctcgccgccgtcgaccgcgccaacctcaagcacatggtcctcttcagctcgctcgccggcttccacggcaacgtcggccagtctgactacgccatggccaacgaggcccttaacaagatgggcctcgagctcgccaaggacgtctcggtcaagtcgatctgcttcggtccctgggacggtggcatggtgacgccgcagctcaagaagcagttccaggagatgggcgtgcagatcatcccccgcgagggcggcgctgataccgtggcgcgcatcgtgctcggctcctcgccggctgagatccttgtcggcaactggcgcaccccgtccaagaaggtcggctcggacaccatcaccctgcaccgcaagatttccgccaagtccaaccccttcctcgaggaccacgtcatccagggccgccgcgtgctgcccatgacgctggccattggctcgctcgcggagacctgcctcggcctcttccccggctactcgctctgggccattgacgacgcccagctcttcaagggtgtcactgtcgacggcgacgtcaactgcgaggtgaccctcaccccgtcgacggcgccctcgggccgcgtcaacgtccaggccacgctcaagaccttttccagcggcaagctggtcccggcctaccgcgccgtcatcgtgctctccaaccagggcgcgcccccggccaacgccaccatgcagccgccctcgctcgatgccgatccggcgctccagggctccgtctacgacggcaagaccctcttccacggcccggccttccgcggcatcgatgacgtgctctcgtgcaccaagagccagcttgtggccaagtgcagcgctgtccccggctccgacgccgctcgcggcgagtttgccacggacactgacgcccatgaccccttcgtgaacgacctggcctttcaggccatgctcgtctgggtgcgccgcacgctcggccaggctgcgctccccaactcgatccagcgcatcgtccagcaccgcccggtcccgcaggacaagcccttctacattaccctccgctccaaccagtcgggcggtcactcccagcacaagcacgcccttcagttccacaacgagcagggcgatctcttcattgatgtccaggcttcggtcatcgccacggacagccttgccttctaa

SEQ ID NO: 2 - protein, 2910 aa, Schizochytrium sp.
MAARLQEQKGGEMDTRIAIIGMSAILPCGTTVRESWETIRAGIDCLSDLPEDRVDVTAYFDPVKTTKDKIYCKRGGFIPEYDFDAREFGLNMFQMEDSDANQTISLLKVKEALQDAGIDALGKEKKNIGCVLGIGGGQKSSHEFYSRLNYVVVEKVLRKMGMPEEDVKVAVEKYKANFPEWRLDSFPGFLGNVTAGRCTNTFNLDGMNCVVDAACASSLIAVKVAIDELLYGDCDMMVTGATCTDNSIGMYMAFSKTPVFSTDPSVRAYDEKTKGMLIGEGSAMLVLKRYADAVRDGDEIHAVIRGCASSSDGKAAGIYTPTISGQEEALRRAYNRACVDPATVTLVEGHGTGTPVGDRIELTALRNLFDKAYGEGNTEKVAVGSIKSSIGHLKAVAGLAGMIKVIMALKHKTLPGTINVDNPPNLYDNTPINESSLYINTMNRPWFPPPGVPRRAGISSFGFGGANYHAVLEEAEPEHTTAYRLNKRPQPVLMMAATPAALQSLCEAQLKEFEAAIKENETVKNTAYIKCVKFGEQFKFPGSIPATNARLGFLVKDAEDACSTLRAICAQFAKDVTKEAWRLPREGVSFRAKGIATNGAVAALFSGQGAQYTHMFSEVAMNWPQFRQSIAAMDAAQSKVAGSDKDFERVSQVLYPRKPYEREPEQDHKKISLTAYSQPSTLACALGAFEIFKEAGFTPDFAAGHSLGEFAALYAAGCVDRDELFELVCRRARIMGGKDAPATPKGCMAAVIGPNAENIKVQAANVWLGNSNSPSQTVITGSVEGIQAESARLQKEGFRVVPLACESAFHSPQMENASSAFKDVISKVSFRTPKAETKLFSNVSGETYPTDAREMLTQHMTSSVKFLTQVRNMHQAGARIFVEFGPKQVLSKLVSETLKDDPSVVTVSVNPASGTDSDIQLRDAAVQLVVAGVNLQGFDKWDAPDATRMQAIKKKRTTLRLSAATYVSDKTKKVRDAAMNDGRCVTYLKGAAPLIKAPEPVVDEAAKREAERLQKELQDAQRQLDDAKRAAAEANSKLAAAKEEAKTAAASAKPAVDTAVVEKHRAILKSMLAELDGYGSVDASSLQQQQQQQTAPAPVKAAAPAAPVASAPAPAVSNELLEKAETVVMEVLAAKTGYETDMIEADMELETELGIDSIKRVEILSEVQAMLNVEAKDVDALSRTRTVGEVVNAMKAEIAGSSAPAPAAAAPAPAKAAPAAAAPAVSNELLEKAETVVMEVLAAKTGYETDMIESDMELETELGIDSIKRVEILSEVQAMLNVEAKDVDALSRTRTVGEVVNAMKAEIAGGSAPAPAAAAPGPAAAAPAPAAAAPAVSNELLEKAETVVMEVLAAKTGYETDMIESDMELETELGIDSIKRVEILSEVQAMLNVEAKDVDALSRTRTVGEVVDAMKAEIAGGSAPAPAAAAPAPAAAAPAPAAPAPAVSSELLEKAETVVMEVLAAKTGYETDMIESDMELETELGIDSIKRVEILSEVQAMLNVEAKDVDALSRTRTVGEVVDAMKAEIAGGSAPAPAAAAPAPAAAAPAPAAPAPAAPAPAVSSELLEKAETVVMEVLAAKTGYETDMIESDMELETELGIDSIKRVEILSEVQAMLNVEAKDVDALSRTRTVGEVVDAMKAEIAGSSASAPAAAAPAPAAAAPAPAAAAPAVSNELLEKAETVVMEVLAAKTGYETDMIESDMELETELGIDSIKRVEILSEVQAMLNVEAKDVDALSRTRTVGEVVDAMKAEIAGGSAPAPAAAAPAPAAAAPAVSNELLEKAETVVMEVLAAKTGYETDMIESDMELETELGIDSIKRVEILSEVQAMLNVEAKDVDALSRTRTVGEVVDAMKAEIAGSSAPAPAAAAPAPAAAAPAPAAAAPAVSSELLEKAETVVMEVLAAKTGYETDMIESDMELETELGIDSIKRVEILSEVQAMLNVEAKDVDALSRTRTVGEVVDAMKAEIAGGSAPAPAAAAPAPAAAAPAVSNELLEKAETVVMEVLAAKTGYETDMIESDMELETELGIDSIKRVEILSEVQAMLNVEAKDVDALSRTRTVGEVVDAMKAEIAGGSAPAPAAAAPASAGAAPAVKIDSVHGADCDDLSLMHAKVVDIRRPDELILERPENRPVLVVDDGSELTLALVRVLGACAVVLTFEGLQLAQRAGAAAIRHVLAKDLSAESAEKAIKEAEQRFGALGGFISQQAERFEPAEILGFTLMCAKFAKASLCTAVAGGRPAFIGVARLDGRLGFTSQGTSDALKRAQRGAIFGLCKTIGLEWSESDVFSRGVDIAQGMHPEDAAVAIVREMACADIRIREVGIGANQQRCTIRAAKLETGNPQRQIAKDDVLLVSGGARGITPLCIREITRQIAGGKYILLGRSKVSASEPAWCAGITDEKAVQKAATQELKRAFSAGEGPKPTPRAVTKLVGSVLGAREVRSSIAAIEALGGKAIYSSCDVNSAADVAKAVRDAESQLGARVSGIVHASGVLRDRLIEKKLPDEFDAVFGTKVTGLENLLAAVDRANLKHMVLFSSLAGFHGNVGQSDYAMANEALNKMGLELAKDVSVKSICFGPWDGGMVTPQLKKQFQEMGVQIIPREGGADTVARIVLGSSPAEILVGNWRTPSKKVGSDTITLHRKISAKSNPFLEDHVIQGRRVLPMTLAIGSLAETCLGLFPGYSLWAIDDAQLFKGVTVDGDVNCEVTLTPSTAPSGRVNVQATLKTFSSGKLVPAYRAVIVLSNQGAPPANATMQPPSLDADPALQGSVYDGKTLFHGPAFRGIDDVLSCTKSQLVAKCSAVPGSDAARGEFATDTDAHDPFVNDLAFQAMLVWVRRTLGQAALPNSIQRIVQHRPVPQDKPFYITLRSNQSGGHSQHKHALQFHNEQGDLFIDVQASVIATDSLAF

SEQ ID NO: 3 - DNA, 6180 bp, Schizochytrium sp.
  CDS (1)..(6180)
atggccgctcggaatgtgagcgccgcgcatgagatgcacgatgaaaagcgcatcgccgtcgtcggcatggccgtccagtacgccggatgcaaaaccaaggacgagttctgggaggtgctcatgaacggcaaggtcgagtccaaggtgatcagcgacaaacgactcggctccaactaccgcgccgagcactacaaagcagagcgcagcaagtatgccgacaccttttgcaacgaaacgtacggcacccttgacgagaacgagatcgacaacgagcacgaactcctcctcaacctcgccaagcaggcactcgcagagacatccgtcaaagactcgacacgctgcggcatcgtcagcggctgcctctcgttccccatggacaacctccagggtgaactcctcaacgtgtaccaaaaccatgtcgagaaaaagctcggggcccgcgtcttcaaggacgcctcccattggtccgaacgcgagcagtccaacaaacccgaggccggtgaccgccgcatcttcatggacccggcctccttcgtcgccgaagaactcaacctcggcgcccttcactactccgtcgacgcagcatgcgccacggcgctctacgtgctccgcctcgcgcaggatcatctcgtctccggcgccgccgacgtcatgctctgcggtgccacctgcctgccggagccctttttcatcctttcgggcttttccaccttccaggccatgcccgtcggcacgggccagaacgtgtccatgccgctgcacaaggacagccagggcctcaccccgggtgagggcggctccatcatggtcctcaagcgtctcgatgatgccatccgcgacggcgaccacatctacggcacccttctcggcgccaatgtcagcaactccggcacaggtctgcccctcaagccccttctccccagcgagaaaaagtgcctcatggacacctacacgcgcattaacgtgcacccgcacaagattcagtacgtcgagtgccacgccaccggcacgccccagggtgatcgtgtggaaatcgacgccgtcaaggcctgctttgaaggcaaggtcccccgtttcggtaccacaaagggcaactttggacacaccctcgtcgcagccggctttgccggtatgtgcaaggtcctcctctccatgaagcatggcatcatcccgcccaccccgggtatcgatgacgagaccaagatggaccctctcgtcgtctccggtgaggccatcccatggccagagaccaacggcgagcccaagcgcgccggtctctcggcctttggctttggtggcaccaacgcccatgccgtctttgaggagcatgacccctccaacgccgcctgcacgggccacgactccatttctgcgctctcggcccgctgcggcggtgaaagcaacatgcgcatcgccatcactggtatggacgccacctttggcgctctcaagggactcgacgccttcgagcgcgccatttacaccggcgctcacggtgccatcccactcccagaaaagcgctggcgctttctcggcaaggacaaggactttcttgacctctgcggcgtcaaggccaccccgcacggctgctacattgaagatgttgaggtcgacttccagcgcctccgcacgcccatgacccctgaagacatgctcctccctcagcagcttctggccgtcaccaccattgaccgcgccatcctcgactcgggaatgaaaaagggtggcaatgtcgccgtctttgtcggcctcggcaccgacctcgagctctaccgtcaccgtgctcgcgtcgctctcaaggagcgcgtccgccctgaagcctccaagaagctcaatgacatgatgcagtacattaacgactgcggcacatccacatcgtacacctcgtacattggcaacctcgtcgccacgcgcgtctcgtcgcagtggggcttcacgggcccctcctttacgatcaccgagggcaacaactccgtctaccgctgcgccgagctcggcaagtacctcctcgagaccggcgaggtcgatggcgtcgtcgttgcgggtgtcgatctctgcggcagtgccgaaaacctttacgtcaagtctcgccgcttcaaggtgtccacctccgataccccgcgcgccagctttgacgccgccgccgatggctactttgtcggcgagggctgcggtgcctttgtgctcaagcgtgagactagctgcaccaaggacgaccgtatctacgcttgcatggatgccatcgtccctggcaacgtccctagcgcctgcttgcgcgaggccctcgaccaggcgcgcgtcaagccgggcgatatcgagatgctcgagctcagcgccgactccgcccgccacctcaaggacccgtccgtcctgcccaaggagctcactgccgaggaggaaatcggcggccttcagacgatccttcgtgacgatgacaagctcccgcgcaacgtcgcaacgggcagtgtcaaggccaccgtcggtgacaccggttatgcctctggtgctgccagcctcatcaaggctgcgctttgcatctacaaccgctacctgcccagcaacggcgacgactgggatgaacccgcccctgaggcgccctgggacagcaccctctttgcgtgccagacctcgcgcgcttggctcaagaaccctggcgagcgtcgctatgcggccgtctcgggcgtctccgagacgcgctcgtgctattccgtgctcctctccgaagccgagggccactacgagcgcgagaaccgcatctcgctcgacgaggaggcgcccaagctcattgtgcttcgcgccgactcccacgaggagatccttggtcgcctcgacaagatccgcgagcgcttcttgcagcccacgggcgccgccccgcgcgagtccgagctcaaggcgcaggcccgccgcatcttcctcgagctcctcggcgagacccttgcccaggatgccgcttcttcaggctcgcaaaagcccctcgctctcagcctcgtctccacgccctccaagctccagcgcgaggtcgagctcgcggccaagggtatcccgcgctgcctcaagatgcgccgcgattggagctcccctgctggcagccgctacgcgcctgagccgctcgccagcgaccgcgtcgccttcatgtacggcgaaggtcgcagcccttactacggcatcacccaagacattcaccgcatttggcccgaactccacgaggtcatcaacgaaaagacgaaccgtctctgggccgaaggcgaccgctgggtcatgccgcgcgccagcttcaagtcggagctcgagagccagcagcaagagtttgatcgcaacatgattgaaatgttccgtcttggaatcctcacctcaattgccttcaccaatctggcgcgcgacgttctcaacatcacgcccaaggccgcctttggcctcagtcttggcgagatttccatgatttttgccttttccaagaagaacggtctcatctccgaccagctcaccaaggatcttcgcgagtccgacgtgtggaacaaggctctggccgttgaatttaatgcgctgcgcgaggcctggggcattccacagagtgtccccaaggacgagttctggcaaggctacattgtgcgcggcaccaagcaggatatcgaggcggccatcgccccggacagcaagtacgtgcgcctcaccatcatcaatgatgccaacaccgccctcattagcggcaagcccgacgcctgcaaggctgcgatcgcgcgtctcggtggcaacattcctgcgcttcccgtgacccagggcatgtgcggccactgccccgaggtgggaccttataccaaggatatcgccaagatccatgccaaccttgagttccccgttgtcgacggccttgacctctggaccacaatcaaccagaagcgcctcgtgccacgcgccacgggcgccaaggacgaatgggccccttcttcctttggcgagtacgccggccagctctacgagaagcaggctaacttcccccaaatcgtcgagaccatttacaagcaaaactacgacgtctttgtcgaggttgggcccaacaaccaccgtagcaccgcagtgcgcaccacgcttggtccccagcgcaaccaccttgctggcgccatcgacaagcagaacgaggatgcttggacgaccatcgtcaagcttgtggcttcgctcaaggcccaccttgttcctggcgtcacgatctcgccgctgtaccactccaagcttgtggcggaggctgaggcttgctacgctgcgctctgcaagggtgaaaagcccaagaagaacaagtttgtgcgcaagattcagctcaacggtcgcttcaacagcaaggcggaccccatctcctcggccgatcttgccagctttccgcctgcggaccctgccattgaagccgccatctcgagccgcatcatgaagcctgtcgctcccaagttctacgcgcgtctcaacattgacgagcaggacgagacccgagatccgatcctcaacaaggacaacgcgccgtcttcttcttcttcttcttcttcttcttcttcttcttcttcttctccgtcgcctgctccttcggcccccgtgcaaaagaaggctgctcccgccgcggagaccaaggctgttgcttcggctgacgcacttcgcagtgccctgctcgatctcgacagtatgcttgcgctgagctctgccagtgcctccggcaaccttgttgagactgcgcctagcgacgcctcggtcattgtgccgccctgcaacattgcggatctcggcagccgcgccttcatgaaaacgtacggtgtttcggcgcctctgtacacgggcgccatggccaagggcattgcctctgcggacctcgtcattgccgccggccgccagggcatccttgcgtcctttggcgccggcggacttcccatgcaggttgtgcgtgagtccatcgaaaagattcaggccgccctgcccaatggcccgtacgctgtcaaccttatccattctccctttgacagcaacctcgaaaagggcaatgtcgatctcttcctcgagaagggtgtcacctttgtcgaggcctcggcctttatgacgctcaccccgcaggtcgtgcggtaccgcgcggctggcctcacgcgcaacgccgacggctcggtcaacatccgcaaccgtatcattggcaaggtctcgcgcaccgagctcgccgagatgttcatgcgtcctgcgcccgagcaccttcttcagaagctcattgcttccggcgagatcaaccaggagcaggccgagctcgcccgccgtgttcccgtcgctgacgacatcgcggtcgaagctgactcgggtggccacaccgacaaccgccccatccacgtcattctgcccctcatcatcaaccttcgcgaccgccttcaccgcgagtgcggctacccggccaaccttcgcgtccgtgtgggcgccggcggtggcattgggtgcccccaggcggcgctggccaccttcaacatgggtgcctcctttattgtcaccggcaccgtgaaccaggtcgccaagcagtcgggcacgtgcgacaatgtgcgcaagcagctcgcgaaggccacttactcggacgtatgcatggccccggctgccgacatgttcgaggaaggcgtcaagcttcaggtcctcaagaagggaaccatgtttccctcgcgcgccaacaagctctacgagctcttttgcaagtacgactcgttcgagtccatgccccccgcagagcttgcgcgcgtcgagaagcgcatcttcagccgcgcgctcgaagaggtctgggacgagaccaaaaacttttacattaaccgtcttcacaacccggagaagatccagcgcgccgagcgcgaccccaagctcaagatgtcgctgtgctttcgctggtacctgagcctggcgagccgctgggccaacactggagcttccgatcgcgtcatggactaccaggtctggtgcggtcctgccattggttccttcaacgatttcatcaagggaacttaccttgatccggccgtcgcaaacgagtacccgtgcgtcgttcagattaacaagcagatccttcgtggagcgtgcttcttgcgccgtctcgaaattctgcgcaacgcacgcctttccgatggcgctgccgctcttgtggccagcatcgatgacacatacgtcccggccgagaagctgtaa

SEQ ID NO: 4 - protein, 2059 aa, Schizochytrium sp.
MAARNVSAAHEMHDEKRIAVVGMAVQYAGCKTKDEFWEVLMNGKVESKVISDKRLGSNYRAEHYKAERSKYADTFCNETYGTLDENEIDNEHELLLNLAKQALAETSVKDSTRCGIVSGCLSFPMDNLQGELLNVYQNHVEKKLGARVFKDASHWSEREQSNKPEAGDRRIFMDPASFVAEELNLGALHYSVDAACATALYVLRLAQDHLVSGAADVMLCGATCLPEPFFILSGFSTFQAMPVGTGQNVSMPLHKDSQGLTPGEGGSIMVLKRLDDAIRDGDHIYGTLLGANVSNSGTGLPLKPLLPSEKKCLMDTYTRINVHPHKIQYVECHATGTPQGDRVEIDAVKACFEGKVPRFGTTKGNFGHTLVAAGFAGMCKVLLSMKHGIIPPTPGIDDETKMDPLVVSGEAIPWPETNGEPKRAGLSAFGFGGTNAHAVFEEHDPSNAACTGHDSISALSARCGGESNMRIAITGMDATFGALKGLDAFERAIYTGAHGAIPLPEKRWRFLGKDKDFLDLCGVKATPHGCYIEDVEVDFQRLRTPMTPEDMLLPQQLLAVTTIDRAILDSGMKKGGNVAVFVGLGTDLELYRHRARVALKERVRPEASKKLNDMMQYINDCGTSTSYTSYIGNLVATRVSSQWGFTGPSFTITEGNNSVYRCAELGKYLLETGEVDGVVVAGVDLCGSAENLYVKSRRFKVSTSDTPRASFDAAADGYFVGEGCGAFVLKRETSCTKDDRIYACMDAIVPGNVPSACLREALDQARVKPGDIEMLELSADSARHLKDPSVLPKELTAEEEIGGLQTILRDDDKLPRNVATGSVKATVGDTGYASGAASLIKAALCIYNRYLPSNGDDWDEPAPEAPWDSTLFACQTSRAWLKNPGERRYAAVSGVSETRSCYSVLLSEAEGHYERENRISLDEEAPKLIVLRADSHEEILGRLDKIRERFLQPTGAAPRESELKAQARRIFLELLGETLAQDAASSGSQKPLALSLVSTPSKLQREVELAAKGIPRCLKMRRDWSSPAGSRYAPEPLASDRVAFMYGEGRSPYYGITQDIHRIWPELHEVINEKTNRLWAEGDRWVMPRASFKSELESQQQEFDRNMIEMFRLGILTSIAFTNLARDVLNITPKAAFGLSLGEISMIFAFSKKNGLISDQLTKDLRESDVWNKALAVEFNALREAWGIPQSVPKDEFWQGYIVRGTKQDIEAAIAPDSKYVRLTIINDANTALISGKPDACKAAIARLGGNIPALPVTQGMCGHCPEVGPYTKDIAKIHANLEFPVVDGLDLWTTINQKRLVPRATGAKDEWAPSSFGEYAGQLYEKQANFPQIVETIYKQNYDVFVEVGPNNHRSTAVRTTLGPQRNHLAGAIDKQNEDAWTTIVKLVASLKAHLVPGVTISPLYHSKLVAEAEACYAALCKGEKPKKNKFVRKIQLNGRFNSKADPISSADLASFPPADPAIEAAISSRIMKPVAPKFYARLNIDEQDETRDPILNKDNAPSSSSSSSSSSSSSSSPSPAPSAPVQKKAAPAAETKAVASADALRSALLDLDSMLALSSASASGNLVETAPSDASVIVPPCNIADLGSRAFMKTYGVSAPLYTGAMAKGIASADLVIAAGRQGILASFGAGGLPMQVVRESIEKIQAALPNGPYAVNLIHSPFDSNLEKGNVDLFLEKGVTFVEASAFMTLTPQVVRYRAAGLTRNADGSVNIRNRIIGKVSRTELAEMFMRPAPEHLLQKLIASGEINQEQAELARRVPVADDIAVEADSGGHTDNRPIHVILPLIINLRDRLHRECGYPANLRVRVGAGGGIGCPQAALATFNMGASFIVTGTVNQVAKQSGTCDNVRKQLAKATYSDVCMAPAADMFEEGVKLQVLKKGTMFPSRANKLYELFCKYDSFESMPPAELARVEKRIFSRALEEVWDETKNFYINRLHNPEKIQRAERDPKLKMSLCFRWYLSLASRWANTGASDRVMDYQVWCGPAIGSFNDFIKGTYLDPAVANEYPCVVQINKQILRGACFLRRLEILRNARLSDGAAALVASIDDTYVPAEKL

SEQ ID NO: 5 - DNA, 4509 bp, Schizochytrium sp.
  CDS (1)..(4509)
atggcgctccgtgtcaagacgaacaagaagccatgctgggagatgaccaaggaggagctgaccagcggcaagaccgaggtgttcaactatgaggaactcctcgagttcgcagagggcgacatcgccaaggtcttcggacccgagttcgccgtcatcgacaagtacccgcgccgcgtgcgcctgcccgcccgcgagtacctgctcgtgacccgcgtcaccctcatggacgccgaggtcaacaactaccgcgtcggcgcccgcatggtcaccgagtacgatctccccgtcaacggagagctctccgagggcggagactgcccctgggccgtcctggtcgagagtggccagtgcgatctcatgctcatctcctacatgggcattgacttccagaaccagggcgaccgcgtctaccgcctgctcaacaccacgctcaccttttacggcgtggcccacgagggcgagaccctcgagtacgacattcgcgtcaccggcttcgccaagcgtctcgacggcggcatctccatgttcttcttcgagtacgactgctacgtcaacggccgcctcctcatcgagatgcgcgatggctgcgccggcttcttcaccaacgaggagctcgacgccggcaagggcgtcgtcttcacccgcggcgacctcgccgcccgcgccaagatcccaaagcaggacgtctccccctacgccgtcgccccctgcctccacaagaccaagctcaacgaaaaggagatgcagaccctcgtcgacaaggactgggcatccgtctttggctccaagaacggcatgccggaaatcaactacaaactctgcgcgcgtaagatgctcatgattgaccgcgtcaccagcattgaccacaagggcggtgtctacggcctcggtcagctcgtcggtgaaaagatcctcgagcgcgaccactggtactttccctgccactttgtcaaggatcaggtcatggccggatccctcgtctccgacggctgcagccagatgctcaagatgtacatgatctggctcggcctccacctcaccaccggaccctttgacttccgcccggtcaacggccaccccaacaaggtccgctgccgcggccaaatctccccgcacaagggcaagctcgtctacgtcatggagatcaaggagatgggcttcgacgaggacaacgacccgtacgccattgccgacgtcaacatcattgatgtcgacttcgaaaagggccaggactttagcctcgaccgcatcagcgactacggcaagggcgacctcaacaagaagatcgtcgtcgactttaagggcatcgctctcaagatgcagaagcgctccaccaacaagaacccctccaaggttcagcccgtctttgccaacggcgccgccactgtcggccccgaggcctccaaggcttcctccggcgccagcgccagcgccagcgccgccccggccaagcctgccttcagcgccgatgttcttgcgcccaagcccgttgcccttcccgagcacatcctcaagggcgacgccctcgcccccaaggagatgtcctggcaccccatggcccgcatcccgggcaacccgacgccctcttttgcgccctcggcctacaagccgcgcaacatcgcctttacgcccttccccggcaaccccaacgataacgaccacaccccgggcaagatgccgctcacctggttcaacatggccgagttcatggccggcaaggtcagcatgtgcctcggccccgagttcgccaagttcgacgactcgaacaccagccgcagccccgcttgggacctcgctctcgtcacccgcgccgtgtctgtgtctgacctcaagcacgtcaactaccgcaacatcgacctcgacccctccaagggtaccatggtcggcgagttcgactgccccgcggacgcctggttctacaagggcgcctgcaacgatgcccacatgccgtactcgatcctcatggagatcgccctccagacctcgggtgtgctcacctcggtgctcaaggcgcccctgaccatggagaaggacgacatcctcttccgcaacctcgacgccaacgccgagttcgtgcgcgccgacctcgactaccgcggcaagactatccgcaacgtcaccaagtgcactggctacagcatgctcggcgagatgggcgtccaccgcttcacctttgagctctacgtcgatgatgtgctcttttacaagggctcgacctcgttcggctggttcgtgcccgaggtctttgccgcccaggccggcctcgacaacggccgcaagtcggagccctggttcattgagaacaaggttccggcctcgcaggtctcctcctttgacgtgcgccccaacggcagcggccgcaccgccatcttcgccaacgcccccagcggcgcccagctcaaccgccgcacggaccagggccagtacctcgacgccgtcgacattgtctccggcagcggcaagaagagcctcggctacgcccacggttccaagacggtcaacccgaacgactggttcttctcgtgccacttttggtttgactcggtcatgcccggaagtctcggtgtcgagtccatgttccagctcgtcgaggccatcgccgcccacgaggatctcgctggcaagcacggcattgccaaccccacctttgtgcacgccccgggcaagatcagctggaagtaccgcggccagctcacgcccaagagcaagaagatggactcggaggtccacatcgtgtccgtggacgcccacgacggcgttgtcgacctcgtcgccgacggcttcctctgggccgacagcctccgcgtctactcggtgagcaacattcgcgtgcgcatcgcctccggtgaggcccctgccgccgcctcctccgccgcctctgtgggctcctcggcttcgtccgtcgagcgcacgcgctcgagccccgctgtcgcctccggcccggcccagaccatcgacctcaagcagctcaagaccgagctcctcgagctcgatgccccgctctacctctcgcaggacccgaccagcggccagctcaagaagcacaccgacgtggcctccggccaggccaccatcgtgcagccctgcacgctcggcgacctcggtgaccgctccttcatggagacctacggcgtcgtcgccccgctgtacacgggcgccatggccaagggcattgcctcggcggacctcgtcatcgccgccggcaagcgcaagatcctcggctcctttggcgccggcggcctccccatgcaccacgtgcgcgccgccctcgagaagatccaggccgccctgcctcagggcccctacgccgtcaacctcatccactcgccttttgacagcaacctcgagaagggcaacgtcgatctcttcctcgagaagggcgtcactgtggtggaggcctcggcattcatgaccctcaccccgcaggtcgtgcgctaccgcgccgccggcctctcgcgcaacgccgacggttcggtcaacatccgcaaccgcatcatcggcaaggtctcgcgcaccgagctcgccgagatgttcatccgcccggccccggagcacctcctcgagaagctcatcgcctcgggcgagatcacccaggagcaggccgagctcgcgcgccgcgttcccgtcgccgacgatatcgctgtcgaggctgactcgggcggccacaccgacaaccgccccatccacgtcatcctcccgctcatcatcaacctccgcaaccgcctgcaccgcgagtgcggctaccccgcgcacctccgcgtccgcgttggcgccggcggtggcgtcggctgcccgcaggccgccgccgccgcgctcaccatgggcgccgccttcatcgtcaccggcactgtcaaccaggtcgccaagcagtccggcacctgcgacaacgtgcgcaagcagctctcgcaggccacctactcggatatctgcatggccccggccgccgacatgttcgaggagggcgtcaagctccaggtcctcaagaagggaaccatgttcccctcgcgcgccaacaagctctacgagctcttttgcaagtacgactccttcgactccatgcctcctgccgagctcgagcgcatcgagaagcgtatcttcaagcgcgcactccaggaggtctgggaggagaccaaggacttttacattaacggtctcaagaacccggagaagatccagcgcgccgagcacgaccccaagctcaagatgtcgctctgcttccgctggtaccttggtcttgccagccgctgggccaacatgggcgccccggaccgcgtcatggactaccaggtctggtgtggcccggccattggcgccttcaacgacttcatcaagggcacctacctcgaccccgctgtctccaacgagtacccctgtgtcgtccagatcaacctgcaaatcctccgtggtgcctgctacctgcgccgtctcaacgccctgcgcaacgacccgcgcattgacctcgagaccgaggatgctgcctttgtctacgagcccaccaacgcgctctaa

SEQ ID NO: 6 - protein, 1502 aa, Schizochytrium sp.
MALRVKTNKKPCWEMTKEELTSGKTEVFNYEELLEFAEGDIAKVFGPEFAVIDKYPRRVRLPAREYLLVTRVTLMDAEVNNYRVGARMVTEYDLPVNGELSEGGDCPWAVLVESGQCDLMLISYMGIDFQNQGDRVYRLLNTTLTFYGVAHEGETLEYDIRVTGFAKRLDGGISMFFFEYDCYVNGRLLIEMRDGCAGFFTNEELDAGKGVVFTRGDLAARAKIPKQDVSPYAVAPCLHKTKLNEKEMQTLVDKDWASVFGSKNGMPEINYKLCARKMLMIDRVTSIDHKGGVYGLGQLVGEKILERDHWYFPCHFVKDQVMAGSLVSDGCSQMLKMYMIWLGLHLTTGPFDFRPVNGHPNKVRCRGQISPHKGKLVYVMEIKEMGFDEDNDPYAIADVNIIDVDFEKGQDFSLDRISDYGKGDLNKKIVVDFKGIALKMQKRSTNKNPSKVQPVFANGAATVGPEASKASSGASASASAAPAKPAFSADVLAPKPVALPEHILKGDALAPKEMSWHPMARIPGNPTPSFAPSAYKPRNIAFTPFPGNPNDNDHTPGKMPLTWFNMAEFMAGKVSMCLGPEFAKFDDSNTSRSPAWDLALVTRAVSVSDLKHVNYRNIDLDPSKGTMVGEFDCPADAWFYKGACNDAHMPYSILMEIALQTSGVLTSVLKAPLTMEKDDILFRNLDANAEFVRADLDYRGKTIRNVTKCTGYSMLGEMGVHRFTFELYVDDVLFYKGSTSFGWFVPEVFAAQAGLDNGRKSEPWFIENKVPASQVSSFDVRPNGSGRTAIFANAPSGAQLNRRTDQGQYLDAVDIVSGSGKKSLGYAHGSKTVNPNDWFFSCHFWFDSVMPGSLGVESMFQLVEAIAAHEDLAGKHGIANPTFVHAPGKISWKYRGQLTPKSKKMDSEVHIVSVDAHDGVVDLVADGFLWADSLRVYSVSNIRVRIASGEAPAAASSAASVGSSASSVERTRSSPAVASGPAQTIDLKQLKTELLELDAPLYLSQDPTSGQLKKHTDVASGQATIVQPCTLGDLGDRSFMETYGVVAPLYTGAMAKGIASADLVIAAGKRKILGSFGAGGLPMHHVRAALEKIQAALPQGPYAVNLIHSPFDSNLEKGNVDLFLEKGVTVVEASAFMTLTPQVVRYRAAGLSRNADGSVNIRNRIIGKVSRTELAEMFIRPAPEHLLEKLIASGEITQEQAELARRVPVADDIAVEADSGGHTDNRPIHVILPLIINLRNRLHRECGYPAHLRVRVGAGGGVGCPQAAAAALTMGAAFIVTGTVNQVAKQSGTCDNVRKQLSQATYSDICMAPAADMFEEGVKLQVLKKGTMFPSRANKLYELFCKYDSFDSMPPAELERIEKRIFKRALQEVWEETKDFYINGLKNPEKIQRAEHDPKLKMSLCFRWYLGLASRWANMGAPDRVMDYQVWCGPAIGAFNDFIKGTYLDPAVSNEYPCVVQINLQILRGACYLRRLNALRNDPRIDLETEDAAFVYEPTNAL

SEQ ID NO: 7 - DNA, 1500 bp, Schizochytrium sp.
  CDS (1)..(1500)
atggcggcccgtctgcaggagcaaaagggaggcgagatggatacccgcattgccatcatcggcatgtcggccatcctcccctgcggcacgaccgtgcgcgagtcgtgggagaccatccgcgccggcatcgactgcctgtcggatctccccgaggaccgcgtcgacgtgacggcgtactttgaccccgtcaagaccaccaaggacaagatctactgcaagcgcggtggcttcattcccgagtacgactttgacgcccgcgagttcggactcaacatgttccagatggaggactcggacgcaaaccagaccatctcgcttctcaaggtcaaggaggccctccaggacgccggcatcgacgccctcggcaaggaaaagaagaacatcggctgcgtgctcggcattggcggcggccaaaagtccagccacgagttctactcgcgccttaattatgttgtcgtggagaaggtcctccgcaagatgggcatgcccgaggaggacgtcaaggtcgccgtcgaaaagtacaaggccaacttccccgagtggcgcctcgactccttccctggcttcctcggcaacgtcaccgccggtcgctgcaccaacaccttcaacctcgacggcatgaactgcgttgtcgacgccgcatgcgcctcgtccctcatcgccgtcaaggtcgccatcgacgagctgctctacggtgactgcgacatgatggtcaccggtgccacctgcacggataactccatcggcatgtacatggccttctccaagacccccgtgttctccacggaccccagcgtgcgcgcctacgacgaaaagacaaagggcatgctcatcggcgagggctccgccatgctcgtcctcaagcgctacgccgacgccgtccgcgacggcgatgagatccacgctgttattcgcggctgcgcctcctccagtgatggcaaggccgccggcatctacacgcccaccatttcgggccaggaggaggccctccgccgcgcctacaaccgcgcctgtgtcgacccggccaccgtcactctcgtcgagggtcacggcaccggtactcccgttggcgaccgcatcgagctcaccgccttgcgcaacctctttgacaaggcctacggcgagggcaacaccgaaaaggtcgctgtgggcagcatcaagtccagcatcggccatctcaaggccgtcgccggtctcgccggtatgatcaaggtcatcatggcgctcaagcacaagactctcccgggcaccatcaacgtcgacaacccacccaacctctacgacaacacgcccatcaacgagtcctcgctctacattaacaccatgaaccgcccctggttcccgccccctggtgtgccccgccgcgccggcatttcgagctttggctttggtggcgccaactaccacgccgtcctcgaggaggccgagcccgagcacacgaccgcgtaccgcctcaacaagcgcccgcagcccgtgctcatgatggccgccacgcccgcg

SEQ ID NO: 8 - protein, 500 aa, Schizochytrium sp.
MAARLQEQKGGEMDTRIAIIGMSAILPCGTTVRESWETIRAGIDCLSDLPEDRVDVTAYFDPVKTTKDKIYCKRGGFIPEYDFDAREFGLNMFQMEDSDANQTISLLKVKEALQDAGIDALGKEKKNIGCVLGIGGGQKSSHEFYSRLNYVVVEKVLRKMGMPEEDVKVAVEKYKANFPEWRLDSFPGFLGNVTAGRCTNTFNLDGMNCVVDAACASSLIAVKVAIDELLYGDCDMMVTGATCTDNSIGMYMAFSKTPVFSTDPSVRAYDEKTKGMLIGEGSAMLVLKRYADAVRDGDEIHAVIRGCASSSDGKAAGIYTPTISGQEEALRRAYNRACVDPATVTLVEGHGTGTPVGDRIELTALRNLFDKAYGEGNTEKVAVGSIKSSIGHLKAVAGLAGMIKVIMALKHKTLPGTINVDNPPNLYDNTPINESSLYINTMNRPWFPPPGVPRRAGISSFGFGGANYHAVLEEAEPEHTTAYRLNKRPQPVLMMAATPA

SEQ ID NO: 9 - DNA, 1278 bp, Schizochytrium sp.
  CDS (1)..(1278)
gatgtcaccaaggaggcctggcgcctcccccgcgagggcgtcagcttccgcgccaagggcatcgccaccaacggcgctgtcgccgcgctcttctccggccagggcgcgcagtacacgcacatgtttagcgaggtggccatgaactggccccagttccgccagagcattgccgccatggacgccgcccagtccaaggtcgctggaagcgacaaggactttgagcgcgtctcccaggtcctctacccgcgcaagccgtacgagcgtgagcccgagcaggaccacaagaagatctccctcaccgcctactcgcagccctcgaccctggcctgcgctctcggtgcctttgagatcttcaaggaggccggcttcaccccggactttgccgccggccattcgctcggtgagttcgccgccctctacgccgcgggctgcgtcgaccgcgacgagctctttgagcttgtctgccgccgcgcccgcatcatgggcggcaaggacgcaccggccacccccaagggctgcatggccgccgtcattggccccaacgccgagaacatcaaggtccaggccgccaacgtctggctcggcaactccaactcgccttcgcagaccgtcatcaccggctccgtcgaaggtatccaggccgagagcgcccgcctccagaaggagggcttccgcgtcgtgcctcttgcctgcgagagcgccttccactcgccccagatggagaacgcctcgtcggccttcaaggacgtcatctccaaggtctccttccgcacccccaaggccgagaccaagctcttcagcaacgtctctggcgagacctaccccacggacgcccgcgagatgcttacgcagcacatgaccagcagcgtcaagttcctcacccaggtccgcaacatgcaccaggccggtgcgcgcatctttgtcgagttcggacccaagcaggtgctctccaagcttgtctccgagaccctcaaggatgacccctcggttgtcaccgtctctgtcaacccggcctcgggcacggattcggacatccagctccgcgacgcggccgtccagctcgttgtcgctggcgtcaaccttcagggctttgacaagtgggacgcccccgatgccacccgcatgcaggccatcaagaagaagcgcactaccctccgcctttcggccgccacctacgtctcggacaagaccaagaaggtccgcgacgccgccatgaacgatggccgctgcgtcacctacctcaagggcgccgcaccgctcatcaaggccccggagccc

SEQ ID NO: 10 - protein, 426 aa, Schizochytrium sp.
DVTKEAWRLPREGVSFRAKGIATNGAVAALFSGQGAQYTHMFSEVAMNWPQFRQSIAAMDAAQSKVAGSDKDFERVSQVLYPRKPYEREPEQDHKKISLTAYSQPSTLACALGAFEIFKEAGFTPDFAAGHSLGEFAALYAAGCVDRDELFELVCRRARIMGGKDAPATPKGCMAAVIGPNAENIKVQAANVWLGNSNSPSQTVITGSVEGIQAESARLQKEGFRVVPLACESAFHSPQMENASSAFKDVISKVSFRTPKAETKLFSNVSGETYPTDAREMLTQHMTSSVKFLTQVRNMHQAGARIFVEFGPKQVLSKLVSETLKDDPSVVTVSVNPASGTDSDIQLRDAAVQLVVAGVNLQGFDKWDAPDATRMQAIKKKRTTLRLSAATYVSDKTKKVRDAAMNDGRCVTYLKGAAPLIKAPEP

SEQ ID NO: 11 - protein, 5 aa, Schizochytrium sp.
  MISC_FEATURE (4)..(4): X = any amino acid
GHSXG

SEQ ID NO: 12 - DNA, 258 bp, Schizochytrium sp.
  CDS (1)..(258)
gctgtctcgaacgagcttcttgagaaggccgagactgtcgtcatggaggtcctcgccgccaagaccggctacgagaccgacatgatcgaggctgacatggagctcgagaccgagctcggcattgactccatcaagcgtgtcgagatcctctccgaggtccaggccatgctcaatgtcgaggccaaggatgtcgatgccctcagccgcactcgcactgttggtgaggttgtcaacgccatgaaggccgagatcgctggc

SEQ ID NO: 13 - protein, 86 aa, Schizochytrium sp.
AVSNELLEKAETVVMEVLAAKTGYETDMIEADMELETELGIDSIKRVEILSEVQAMLNVEAKDVDALSRTRTVGEVVNAMKAEIAG

SEQ ID NO: 14 - protein, 5 aa, Schizochytrium sp.
LGIDS

SEQ ID NO: 15 - protein, 21 aa, Schizochytrium sp.
APAPVKAAAPAAPVASAPAPA

SEQ ID NO: 16 - DNA, 3006 bp, Schizochytrium sp.
gcccccgccccggtcaaggctgctgcgcctgccgcccccgttgcctcggcccctgccccggctgtctcgaacgagcttcttgagaaggccgagactgtcgtcatggaggtcctcgccgccaagaccggctacgagaccgacatgatcgaggctgacatggagctcgagaccgagctcggcattgactccatcaagcgtgtcgagatcctctccgaggtccaggccatgctcaatgtcgaggccaaggatgtcgatgccctcagccgcactcgcactgttggtgaggttgtcaacgccatgaaggccgagatcgctggcagctctgccccggcgcctgctgccgctgctccggctccggccaaggctgcccctgccgccgctgcgcctgctgtctcgaacgagcttctcgagaaggccgagaccgtcgtcatggaggtcctcgccgccaagactggctacgagactgacatgatcgagtccgacatggagctcgagactgagctcggcattgactccatcaagcgtgtcgagatcctctccgaggttcaggccatgctcaacgtcgaggccaaggacgtcgacgctctcagccgcactcgcactgtgggtgaggtcgtcaacgccatgaaggctgagatcgctggtggctctgccccggcgcctgccgccgctgccccaggtccggctgctgccgcccctgcgcctgccgccgccgcccctgctgtctcgaacgagcttcttgagaaggccgagaccgtcgtcatggaggtcctcgccgccaagactggctacgagactgacatgatcgagtccgacatggagctcgagaccgagctcggcattgactccatcaagcgtgtcgagattctctccgaggtccaggccatgctcaacgtcgaggccaaggacgtcgacgctctcagccgcacccgcactgttggcgaggtcgtcgatgccatgaaggccgagatcgctggtggctctgccccggcgcctgccgccgctgctcctgctccggctgctgccgcccctgcgcctgccgcccctgcgcctgctgtctcgagcgagcttctcgagaaggccgagactgtcgtcatggaggtcctcgccgccaagactggctacgagactgacatgatcgagtccgacatggagctcgagaccgagctcggcattgactccatcaagcgtgtcgagattctctccgaggtccaggccatgctcaacgtcgaggccaaggacgtcgacgctctcagccgcacccgcactgttggcgaggtcgtcgatgccatgaaggccgagatcgctggtggctctgccccggcgcctgccgccgctgctcctgctccggctgctgccgcccctgcgcctgccgcccctgcgcctgccgcccctgcgcctgctgtctcgagcgagcttctcgagaaggccgagactgtcgtcatggaggtcctcgccgccaagactggctacgagactgacatgattgagtccgacatggagctcgagaccgagctcggcattgactccatcaagcgtgtcgagattctctccgaggttcaggccatgctcaacgtcgaggccaaggacgtcgacgctctcagccgcactcgcactgttggtgaggtcgtcgatgccatgaaggctgagatcgctggcagctccgcctcggcgcctgccgccgctgctcctgctccggctgctgccgctcctgcgcccgctgccgccgcccctgctgtctcgaacgagcttctcgagaaagccgagactgtcgtcatggaggtcctcgccgccaagactggctacgagactgacatgatcgagtccgacatggagctcgagactgagctcggcattgactccatcaagcgtgtcgagatcctctccgaggttcaggccatgctcaacgtcgaggccaaggacgtcgatgccctcagccgcacccgcactgttggcgaggttgtcgatgccatgaaggccgagatcgctggtggctctgccccggcgcctgccgccgctgcccctgctccggctgccgccgcccctgctgtctcgaacgagcttctcgagaaggccgagactgtcgtcatggaggtcctcgccgccaagactggctacgagaccgacatgatcgagtccgacatggagctcgagaccgagctcggcattgactccatcaagcgtgtcgagattctctccgaggttcaggccatgctcaacgtcgaggccaaggacgtcgatgctctcagccgcactcgcactgttggcgaggtcgtcgatgccatgaaggctgagatcgccggcagctccgccccggcgcctgccgccgctgctcctgctccggctgctgccgctcctgcgcccgctgccgctgcccctgctgtctcgagcgagcttctcgagaaggccgagaccgtcgtcatggaggtcctcgccgccaagactggctacgagactgacatgattgagtccgacatggagctcgagactgagctcggcattgactccatcaagcgtgtcgagatcctctccgaggttcaggccatgctcaacgtcgaggccaaggacgtcgatgccctcagccgcacccgcactgttggcgaggttgtcgatgccatgaaggccgagatcgctggtggctctgccccggcgcctgccgccgctgcccctgctccggctgccgccgcccctgctgtctcgaacgagcttcttgagaaggccgagaccgtcgtcatggaggtcctcgccgccaagactggctacgagaccgacatgatcgagtccgacatggagctcgagaccgagctcggcattgactccatcaagcgtgtcgagattctctccgaggttcaggccatgctcaacgtcgaggccaaggacgtcgacgctctcagccgcactcgcactgttggcgaggtcgtcgatgccatgaaggctgagatcgctggtggctctgccccggcgcctgccgccgctgctcctgcctcggctggcgccgcgcctgcg

SEQ ID NO: 17 - DNA, 2133 bp, Schizochytrium sp.
  CDS (1)..(2133)
tttggcgctctcggcggcttcatctcgcagcaggcggagcgcttcgagcccgccgaaatcctcggcttcacgctcatgtgcgccaagttcgccaaggcttccctctgcacggctgtggctggcggccgcccggcctttatcggtgtggcgcgccttgacggccgcctcggattcacttcgcagggcacttctgacgcgctcaagcgtgcccagcgtggtgccatctttggcctctgcaagaccatcggcctcgagtggtccgagtctgacgtcttttcccgcggcgtggacattgctcagggcatgcaccccgaggatgccgccgtggcgattgtgcgcgagatggcgtgcgctgacattcgcattcgcgaggtcggcattggcgcaaaccagcagcgctgcacgatccgtgccgccaagctcgagaccggcaacccgcagcgccagatcgccaaggacgacgtgctgctcgtttctggcggcgctcgcggcatcacgcctctttgcatccgggagatcacgcgccagatcgcgggcggcaagtacattctgcttggccgcagcaaggtctctgcgagcgaaccggcatggtgcgctggcatcactgacgagaaggctgtgcaaaaggctgctacccaggagctcaagcgcgcctttagcgctggcgagggccccaagcccacgccccgcgctgtcactaagcttgtgggctctgttcttggcgctcgcgaggtgcgcagctctattgctgcgattgaagcgctcggcggcaaggccatctactcgtcgtgcgacgtgaactctgccgccgacgtggccaaggccgtgcgcgatgccgagtcccagctcggtgcccgcgtctcgggcatcgttcatgcctcgggcgtgctccgcgaccgtctcatcgagaagaagctccccgacgagttcgacgccgtctttggcaccaaggtcaccggtctcgagaacctcctcgccgccgtcgaccgcgccaacctcaagcacatggtcctcttcagctcgctcgccggcttccacggcaacgtcggccagtctgactacgccatggccaacgaggcccttaacaagatgggcctcgagctcgccaaggacgtctcggtcaagtcgatctgcttcggtccctgggacggtggcatggtgacgccgcagctcaagaagcagttccaggagatgggcgtgcagatcatcccccgcgagggcggcgctgataccgtggcgcgcatcgtgctcggctcctcgccggctgagatccttgtcggcaactggcgcaccccgtccaagaaggtcggctcggacaccatcaccctgcaccgcaagatttccgccaagtccaaccccttcctcgaggaccacgtcatccagggccgccgcgtgctgcccatgacgctggccattggctcgctcgcggagacctgcctcggcctcttccccggctactcgctctgggccattgacgacgcccagctcttcaagggtgtcactgtcgacggcgacgtcaactgcgaggtgaccctcaccccgtcgacggcgccctcgggccgcgtcaacgtccaggccacgctcaagaccttttccagcggcaagctggtcccggcctaccgcgccgtcatcgtgctctccaaccagggcgcgcccccggccaacgccaccatgcagccgccctcgctcgatgccgatccggcgctccagggctccgtctacgacggcaagaccctcttccacggcccggccttccgcggcatcgatgacgtgctctcgtgcaccaagagccagcttgtggccaagtgcagcgctgtccccggctccgacgccgctcgcggcgagtttgccacggacactgacgcccatgaccccttcgtgaacgacctggcctttcaggccatgctcgtctgggtgcgccgcacgctcggccaggctgcgctccccaactcgatccagcgcatcgtccagcaccgcccggtcccgcaggacaagcccttctacattaccctccgctccaaccagtcgggcggtcactcccagcacaagcacgcccttcagttccacaacgagcagggcgatctcttcattgatgtccaggcttcggtcatcgccacggacagccttgccttc

SEQ ID NO: 18 - protein, 711 aa, Schizochytrium sp.
FGALGGFISQQAERFEPAEILGFTLMCAKFAKASLCTAVAGGRPAFIGVARLDGRLGFTSQGTSDALKRAQRGAIFGLCKTIGLEWSESDVFSRGVDIAQGMHPEDAAVAIVREMACADIRIREVGIGANQQRCTIRAAKLETGNPQRQIAKDDVLLVSGGARGITPLCIREITRQIAGGKYILLGRSKVSASEPAWCAGITDEKAVQKAATQELKRAFSAGEGPKPTPRAVTKLVGSVLGAREVRSSIAAIEALGGKAIYSSCDVNSAADVAKAVRDAESQLGARVSGIVHASGVLRDRLIEKKLPDEFDAVFGTKVTGLENLLAAVDRANLKHMVLFSSLAGFHGNVGQSDYAMANEALNKMGLELAKDVSVKSICFGPWDGGMVTPQLKKQFQEMGVQIIPREGGADTVARIVLGSSPAEILVGNWRTPSKKVGSDTITLHRKISAKSNPFLEDHVIQGRRVLPMTLAIGSLAETCLGLFPGYSLWAIDDAQLFKGVTVDGDVNCEVTLTPSTAPSGRVNVQATLKTFSSGKLVPAYRAVIVLSNQGAPPANATMQPPSLDADPALQGSVYDGKTLFHGPAFRGIDDVLSCTKSQLVAKCSAVPGSDAARGEFATDTDAHDPFVNDLAFQAMLVWVRRTLGQAALPNSIQRIVQHRPVPQDKPFYITLRSNQSGGHSQHKHALQFHNEQGDLFIDVQASVIATDSLAF

SEQ ID NO: 19 - DNA, 1350 bp, Schizochytrium sp.
  CDS (1)..(1350)
atggccgctcggaatgtgagcgccgcgcatgagatgcacgatgaaaagcgcatcgccgtcgtcggcatggccgtccagtacgccggatgcaaaaccaaggacgagttctgggaggtgctcatgaacggcaaggtcgagtccaaggtgatcagcgacaaacgactcggctccaactaccgcgccgagcactacaaagcagagcgcagcaagtatgccgacaccttttgcaacgaaacgtacggcacccttgacgagaacgagatcgacaacgagcacgaactcctcctcaacctcgccaagcaggcactcgcagagacatccgtcaaagactcgacacgctgcggcatcgtcagcggctgcctctcgttccccatggacaacctccagggtgaactcctcaacgtgtaccaaaaccatgtcgagaaaaagctcggggcccgcgtcttcaaggacgcctcccattggtccgaacgcgagcagtccaacaaacccgaggccggtgaccgccgcatcttcatggacccggcctccttcgtcgccgaagaactcaacctcggcgcccttcactactccgtcgacgcagcatgcgccacggcgctctacgtgctccgcctcgcgcaggatcatctcgtctccggcgccgccgacgtcatgctctgcggtgccacctgcctgccggagccctttttcatcctttcgggcttttccaccttccaggccatgcccgtcggcacgggccagaacgtgtccatgccgctgcacaaggacagccagggcctcaccccgggtgagggcggctccatcatggtcctcaagcgtctcgatgatgccatccgcgacggcgaccacatctacggcacccttctcggcgccaatgtcagcaactccggcacaggtctgcccctcaagccccttctccccagcgagaaaaagtgcctcatggacacctacacgcgcattaacgtgcacccgcacaagattcagtacgtcgagtgccacgccaccggcacgccccagggtgatcgtgtggaaatcgacgccgtcaaggcctgctttgaaggcaaggtcccccgtttcggtaccacaaagggcaactttggacacaccctcgtcgcagccggctttgccggtatgtgcaaggtcctcctctccatgaagcatggcatcatcccgcccaccccgggtatcgatgacgagaccaagatggaccctctcgtcgtctccggtgaggccatcccatggccagagaccaacggcgagcccaagcgcgccggtctctcggcctttggctttggtggcaccaacgcccatgccgtctttgaggagcatgacccctccaacgccgcctgc

SEQ ID NO: 20 - protein, 450 aa, Schizochytrium sp.
MAARNVSAAHEMHDEKRIAVVGMAVQYAGCKTKDEFWEVLMNGKVESKVISDKRLGSNYRAEHYKAERSKYADTFCNETYGTLDENEIDNEHELLLNLAKQALAETSVKDSTRCGIVSGCLSFPMDNLQGELLNVYQNHVEKKLGARVFKDASHWSEREQSNKPEAGDRRIFMDPASFVAEELNLGALHYSVDAACATALYVLRLAQDHLVSGAADVMLCGATCLPEPFFILSGFSTFQAMPVGTGQNVSMPLHKDSQGLTPGEGGSIMVLKRLDDAIRDGDHIYGTLLGANVSNSGTGLPLKPLLPSEKKCLMDTYTRINVHPHKIQYVECHATGTPQGDRVEIDAVKACFEGKVPRFGTTKGNFGHTLVAAGFAGMCKVLLSMKHGIIPPTPGIDDETKMDPLVVSGEAIPWPETNGEPKRAGLSAFGFGGTNAHAVFEEHDPSNAAC

SEQ ID NO: 21 - DNA, 1323 bp, Schizochytrium sp.
  CDS (1)..(1323)
tcggcccgctgcggcggtgaaagcaacatgcgcatcgccatcactggtatggacgccacctttggcgctctcaagggactcgacgccttcgagcgcgccatttacaccggcgctcacggtgccatcccactcccagaaaagcgctggcgctttctcggcaaggacaaggactttcttgacctctgcggcgtcaaggccaccccgcacggctgctacattgaagatgttgaggtcgacttccagcgcctccgcacgcccatgacccctgaagacatgctcctccctcagcagcttctggccgtcaccaccattgaccgcgccatcctcgactcgggaatgaaaaagggtggcaatgtcgccgtctttgtcggcctcggcaccgacctcgagctctaccgtcaccgtgctcgcgtcgctctcaaggagcgcgtccgccctgaagcctccaagaagctcaatgacatgatgcagtacattaacgactgcggcacatccacatcgtacacctcgtacattggcaacctcgtcgccacgcgcgtctcgtcgcagtggggcttcacgggcccctcctttacgatcaccgagggcaacaactccgtctaccgctgcgccgagctcggcaagtacctcctcgagaccggcgaggtcgatggcgtcgtcgttgcgggtgtcgatctctgcggcagtgccgaaaacctttacgtcaagtctcgccgcttcaaggtgtccacctccgataccccgcgcgccagctttgacgccgccgccgatggctactttgtcggcgagggctgcggtgcctttgtgctcaagcgtgagactagctgcaccaaggacgaccgtatctacgcttgcatggatgccatcgtccctggcaacgtccctagcgcctgcttgcgcgaggccctcgaccaggcgcgcgtcaagccgggcgatatcgagatgctcgagctcagcgccgactccgcccgccacctcaaggacccgtccgtcctgcccaaggagctcactgccgaggaggaaatcggcggccttcagacgatccttcgtgacgatgacaagctcccgcgcaacgtcgcaacgggcagtgtcaaggccaccgtcggtgacaccggttatgcctctggtgctgccagcctcatcaaggctgcgctttgcatctacaaccgctacctgcccagcaacggcgacgactgggatgaacccgcccctgaggcgccctgggacagcaccctctttgcgtgccagacctcgcgcgcttggctcaagaaccctggcgagcgtcgctatgcggccgtctcgggcgtctccgagacgcgctcg

SEQ ID NO: 22 - protein, 441 aa, Schizochytrium sp.
SARCGGESNMRIAITGMDATFGALKGLDAFERAIYTGAHGAIPLPEKRWRFLGKDKDFLDLCGVKATPHGCYIEDVEVDFQRLRTPMTPEDMLLPQQLLAVTTIDRAILDSGMKKGGNVAVFVGLGTDLELYRHRARVALKERVRPEASKKLNDMMQYINDCGTSTSYTSYIGNLVATRVSSQWGFTGPSFTITEGNNSVYRCAELGKYLLETGEVDGVVVAGVDLCGSAENLYVKSRRFKVSTSDTPRASFDAAADGYFVGEGCGAFVLKRETSCTKDDRIYACMDAIVPGNVPSACLREALDQARVKPGDIEMLELSADSARHLKDPSVLPKELTAEEEIGGLQTILRDDDKLPRNVATGSVKATVGDTGYASGAASLIKAALCIYNRYLPSNGDDWDEPAPEAPWDSTLFACQTSRAWLKNPGERRYAAVSGVSETRS

SEQ ID NO: 23 - DNA, 1500 bp, Schizochytrium sp.
  CDS (1)..(1500)
tgctattccgtgctcctctccgaagccgagggccactacgagcgcgagaaccgcatctcgctcgacgaggaggcgcccaagctcattgtgcttcgcgccgactcccacgaggagatccttggtcgcctcgacaagatccgcgagcgcttcttgcagcccacgggcgccgccccgcgcgagtccgagctcaaggcgcaggcccgccgcatcttcctcgagctcctcggcgagacccttgcccaggatgccgcttcttcaggctcgcaaaagcccctcgctctcagcctcgtctccacgccctccaagctccagcgcgaggtcgagctcgcggccaagggtatcccgcgctgcctcaagatgcgccgcgattggagctcccctgctggcagccgctacgcgcctgagccgctcgccagcgaccgcgtcgccttcatgtacggcgaaggtcgcagcccttactacggcatcacccaagacattcaccgcatttggcccgaactccacgaggtcatcaacgaaaagacgaaccgtctctgggccgaaggcgaccgctgggtcatgccgcgcgccagcttcaagtcggagctcgagagccagcagcaagagtttgatcgcaacatgattgaaatgttccgtcttggaatcctcacctcaattgccttcaccaatctggcgcgcgacgttctcaacatcacgcccaaggccgcctttggcctcagtcttggcgagatttccatgatttttgccttttccaagaagaacggtctcatctccgaccagctcaccaaggatcttcgcgagtccgacgtgtggaacaaggctctggccgttgaatttaatgcgctgcgcgaggcctggggcattccacagagtgtccccaaggacgagttctggcaaggctacattgtgcgcggcaccaagcaggatatcgaggcggccatcgccccggacagcaagtacgtgcgcctcaccatcatcaatgatgccaacaccgccctcattagcggcaagcccgacgcctgcaaggctgcgatcgcgcgtctcggtggcaacattcctgcgcttcccgtgacccagggcatgtgcggccactgccccgaggtgggaccttataccaaggatatcgccaagatccatgccaaccttgagttccccgttgtcgacggccttgacctctggaccacaatcaaccagaagcgcctcgtgccacgcgccacgggcgccaaggacgaatgggccccttcttcctttggcgagtacgccggccagctctacgagaagcaggctaacttcccccaaatcgtcgagaccatttacaagcaaaactacgacgtctttgtcgaggttgggcccaacaaccaccgtagcaccgcagtgcgcaccacgcttggtccccagcgcaaccaccttgctggcgccatcgacaagcagaacgaggatgcttggacgaccatcgtcaagcttgtggcttcgctcaaggcccaccttgttcctggcgtc

SEQ ID NO: 24 - protein, 500 aa, Schizochytrium sp.
CYSVLLSEAEGHYERENRISLDEEAPKLIVLRADSHEEILGRLDKIRERFLQPTGAAPRESELKAQARRIFLELLGETLAQDAASSGSQKPLALSLVSTPSKLQREVELAAKGIPRCLKMRRDWSSPAGSRYAPEPLASDRVAFMYGEGRSPYYGITQDIHRIWPELHEVINEKTNRLWAEGDRWVMPRASFKSELESQQQEFDRNMIEMFRLGILTSIAFTNLARDVLNITPKAAFGLSLGEISMIFAFSKKNGLISDQLTKDLRESDVWNKALAVEFNALREAWGIPQSVPKDEFWQGYIVRGTKQDIEAAIAPDSKYVRLTIINDANTALISGKPDACKAAIARLGGNIPALPVTQGMCGHCPEVGPYTKDIAKIHANLEFPVVDGLDLWTTINQKRLVPRATGAKDEWAPSSFGEYAGQLYEKQANFPQIVETIYKQNYDVFVEVGPNNHRSTAVRTTLGPQRNHLAGAIDKQNEDAWTTIVKLVASLKAHLVPGV

SEQ ID NO: 25 - DNA, 1530 bp, Schizochytrium sp.
  CDS (1)..(1530)
ctgctcgatctcgacagtatgcttgcgctgagctctgccagtgcctccggcaaccttgttgagactgcgcctagcgacgcctcggtcattgtgccgccctgcaacattgcggatctcggcagccgcgccttcatgaaaacgtacggtgtttcggcgcctctgtacacgggcgccatggccaagggcattgcctctgcggacctcgtcattgccgccggccgccagggcatccttgcgtcctttggcgccggcggacttcccatgcaggttgtgcgtgagtccatcgaaaagattcaggccgccctgcccaatggcccgtacgctgtcaaccttatccattctccctttgacagcaacctcgaaaagggcaatgtcgatctcttcctcgagaagggtgtcacctttgtcgaggcctcggcctttatgacgctcaccccgcaggtcgtgcggtaccgcgcggctggcctcacgcgcaacgccgacggctcggtcaacatccgcaaccgtatcattggcaaggtctcgcgcaccgagctcgccgagatgttcatgcgtcctgcgcccgagcaccttcttcagaagctcattgcttccggcgagatcaaccaggagcaggccgagctcgcccgccgtgttcccgtcgctgacgacatcgcggtcgaagctgactcgggtggccacaccgacaaccgccccatccacgtcattctgcccctcatcatcaaccttcgcgaccgccttcaccgcgagtgcggctacccggccaaccttcgcgtccgtgtgggcgccggcggtggcattgggtgcccccaggcggcgctggccaccttcaacatgggtgcctcctttattgtcaccggcaccgtgaaccaggtcgccaagcagtcgggcacgtgcgacaatgtgcgcaagcagctcgcgaaggccacttactcggacgtatgcatggccccggctgccgacatgttcgaggaaggcgtcaagcttcaggtcctcaagaagggaaccatgtttccctcgcgcgccaacaagctctacgagctcttttgcaagtacgactcgttcgagtccatgccccccgcagagcttgcgcgcgtcgagaagcgcatcttcagccgcgcgctcgaagaggtctgggacgagaccaaaaacttttacattaaccgtcttcacaacccggagaagatccagcgcgccgagcgcgaccccaagctcaagatgtcgctgtgctttcgctggtacctgagcctggcgagccgctgggccaacactggagcttccgatcgcgtcatggactaccaggtctggtgcggtcctgccattggttccttcaacgatttcatcaagggaacttaccttgatccggccgtcgcaaacgagtacccgtgcgtcgttcagattaacaagcagatccttcgtggagcgtgcttcttgcgccgtctcgaaattctgcgcaacgcacgcctttccgatggcgctgccgctcttgtggccagcatcgatgacacatacgtcccggccgagaagctg

SEQ ID NO: 26 - protein, 510 aa, Schizochytrium sp.
LLDLDSMLALSSASASGNLVETAPSDASVIVPPCNIADLGSRAFMKTYGVSAPLYTGAMAKGIASADLVIAAGRQGILASFGAGGLPMQVVRESIEKIQAALPNGPYAVNLIHSPFDSNLEKGNVDLFLEKGVTFVEASAFMTLTPQVVRYRAAGLTRNADGSVNIRNRIIGKVSRTELAEMFMRPAPEHLLQKLIASGEINQEQAELARRVPVADDIAVEADSGGHTDNRPIHVILPLIINLRDRLHRECGYPANLRVRVGAGGGIGCPQAALATFNMGASFIVTGTVNQVAKQSGTCDNVRKQLAKATYSDVCMAPAADMFEEGVKLQVLKKGTMFPSRANKLYELFCKYDSFESMPPAELARVEKRIFSRALEEVWDETKNFYINRLHNPEKIQRAERDPKLKMSLCFRWYLSLASRWANTGASDRVMDYQVWCGPAIGSFNDFIKGTYLDPAVANEYPCVVQINKQILRGACFLRRLEILRNARLSDGAAALVASIDDTYVPAEKL

SEQ ID NO: 27 - DNA, 1350 bp, Schizochytrium sp.
  CDS (1)..(1350)
atggcgctccgtgtcaagacgaacaagaagccatgctgggagatgaccaaggaggagctgaccagcggcaagaccgaggtgttcaactatgaggaactcctcgagttcgcagagggcgacatcgccaaggtcttcggacccgagttcgccgtcatcgacaagtacccgcgccgcgtgcgcctgcccgcccgcgagtacctgctcgtgacccgcgtcaccctcatggacgccgaggtcaacaactaccgcgtcggcgcccgcatggtcaccgagtacgatctccccgtcaacggagagctctccgagggcggagactgcccctgggccgtcctggtcgagagtggccagtgcgatctcatgctcatctcctacatgggcattgacttccagaaccagggcgaccgcgtctaccgcctgctcaacaccacgctcaccttttacggcgtggcccacgagggcgagaccctcgagtacgacattcgcgtcaccggcttcgccaagcgtctcgacggcggcatctccatgttcttcttcgagtacgactgctacgtcaacggccgcctcctcatcgagatgcgcgatggctgcgccggcttcttcaccaacgaggagctcgacgccggcaagggcgtcgtcttcacccgcggcgacctcgccgcccgcgccaagatcccaaagcaggacgtctccccctacgccgtcgccccctgcctccacaagaccaagctcaacgaaaaggagatgcagaccctcgtcgacaaggactgggcatccgtctttggctccaagaacggcatgccggaaatcaactacaaactctgcgcgcgtaagatgctcatgattgaccgcgtcaccagcattgaccacaagggcggtgtctacggcctcggtcagctcgtcggtgaaaagatcctcgagcgcgaccactggtactttccctgccactttgtcaaggatcaggtcatggccggatccctcgtctccgacggctgcagccagatgctcaagatgtacatgatctggctcggcctccacctcaccaccggaccctttgacttccgcccggtcaacggccaccccaacaaggtccgctgccgcggccaaatctccccgcacaagggcaagctcgtctacgtcatggagatcaaggagatgggcttcgacgaggacaacgacccgtacgccattgccgacgtcaacatcattgatgtcgacttcgaaaagggccaggactttagcctcgaccgcatcagcgactacggcaagggcgacctcaacaagaagatcgtcgtcgactttaagggcatcgctctcaagatgcagaagcgctccaccaacaagaacccctcc

SEQ ID NO: 28 - protein, 450 aa, Schizochytrium sp.
MALRVKTNKKPCWEMTKEELTSGKTEVFNYEELLEFAEGDIAKVFGPEFAVIDKYPRRVRLPAREYLLVTRVTLMDAEVNNYRVGARMVTEYDLPVNGELSEGGDCPWAVLVESGQCDLMLISYMGIDFQNQGDRVYRLLNTTLTFYGVAHEGETLEYDIRVTGFAKRLDGGISMFFFEYDCYVNGRLLIEMRDGCAGFFTNEELDAGKGVVFTRGDLAARAKIPKQDVSPYAVAPCLHKTKLNEKEMQTLVDKDWASVFGSKNGMPEINYKLCARKMLMIDRVTSIDHKGGVYGLGQLVGEKILERDHWYFPCHFVKDQVMAGSLVSDGCSQMLKMYMIWLGLHLTTGPFDFRPVNGHPNKVRCRGQISPHKGKLVYVMEIKEMGFDEDNDPYAIADVNIIDVDFEKGQDFSLDRISDYGKGDLNKKIVVDFKGIALKMQKRSTNKNPS

SEQ ID NO: 29 - DNA, 1497 bp, Schizochytrium sp.
  CDS (1)..(1497)
aaggttcagcccgtctttgccaacggcgccgccactgtcggccccgaggcctccaaggcttcctccggcgccagcgccagcgccagcgccgccccggccaagcctgccttcagcgccgatgttcttgcgcccaagcccgttgcccttcccgagcacatcctcaagggcgacgccctcgcccccaaggagatgtcctggcaccccatggcccgcatcccgggcaacccgacgccctcttttgcgccctcggcctacaagccgcgcaacatcgcctttacgcccttccccggcaaccccaacgataacgaccacaccccgggcaagatgccgctcacctggttcaacatggccgagttcatggccggcaaggtcagcatgtgcctcggccccgagttcgccaagttcgacgactcgaacaccagccgcagccccgcttgggacctcgctctcgtcacccgcgccgtgtctgtgtctgacctcaagcacgtcaactaccgcaacatcgacctcgacccctccaagggtaccatggtcggcgagttcgactgccccgcggacgcctggttctacaagggcgcctgcaacgatgcccacatgccgtactcgatcctcatggagatcgccctccagacctcgggtgtgctcacctcggtgctcaaggcgcccctgaccatggagaaggacgacatcctcttccgcaacctcgacgccaacgccgagttcgtgcgcgccgacctcgactaccgcggcaagactatccgcaacgtcaccaagtgcactggctacagcatgctcggcgagatgggcgtccaccgcttcacctttgagctctacgtcgatgatgtgctcttttacaagggctcgacctcgttcggctggttcgtgcccgaggtctttgccgcccaggccggcctcgacaacggccgcaagtcggagccctggttcattgagaacaaggttccggcctcgcaggtctcctcctttgacgtgcgccccaacggcagcggccgcaccgccatcttcgccaacgcccccagcggcgcccagctcaaccgccgcacggaccagggccagtacctcgacgccgtcgacattgtctccggcagcggcaagaagagcctcggctacgcccacggttccaagacggtcaacccgaacgactggttcttctcgtgccacttttggtttgactcggtcatgcccggaagtctcggtgtcgagtccatgttccagctcgtcgaggccatcgccgcccacgaggatctcgctggcaagcacggcattgccaaccccacctttgtgcacgccccgggcaagatcagctggaagtaccgcggccagctcacgcccaagagcaagaagatggactcggaggtccacatcgtgtccgtggacgcccacgacggcgttgtcgacctcgtcgccgacggcttcctctgggccgacagcctccgcgtctactcggtgagcaacattcgcgtgcgcatcgcctccggt

SEQ ID NO: 30 - protein, 499 aa, Schizochytrium sp.
KVQPVFANGAATVGPEASKASSGASASASAAPAKPAFSADVLAPKPVALPEHILKGDALAPKEMSWHPMARIPGNPTPSFAPSAYKPRNIAFTPFPGNPNDNDHTPGKMPLTWFNMAEFMAGKVSMCLGPEFAKFDDSNTSRSPAWDLALVTRAVSVSDLKHVNYRNIDLDPSKGTMVGEFDCPADAWFYKGACNDAHMPYSILMEIALQTSGVLTSVLKAPLTMEKDDILFRNLDANAEFVRADLDYRGKTIRNVTKCTGYSMLGEMGVHRFTFELYVDDVLFYKGSTSFGWFVPEVFAAQAGLDNGRKSEPWFIENKVPASQVSSFDVRPNGSGRTAIFANAPSGAQLNRRTDQGQYLDAVDIVSGSGKKSLGYAHGSKTVNPNDWFFSCHFWFDSVMPGSLGVESMFQLVEAIAAHEDLAGKHGIANPTFVHAPGKISWKYRGQLTPKSKKMDSEVHIVSVDAHDGVVDLVADGFLWADSLRVYSVSNIRVRIASG

SEQ ID NO: 31 - DNA, 1512 bp, Schizochytrium sp.
  CDS (1)..(1512)
gccccgctctacctctcgcaggacccgaccagcggccagctcaagaagcacaccgacgtggcctccggccaggccaccatcgtgcagccctgcacgctcggcgacctcggtgaccgctccttcatggagacctacggcgtcgtcgccccgctgtacacgggcgccatggccaagggcattgcctcggcggacctcgtcatcgccgccggcaagcgcaagatcctcggctcctttggcgccggcggcctccccatgcaccacgtgcgcgccgccctcgagaagatccaggccgccctgcctcagggcccctacgccgtcaacctcatccactcgccttttgacagcaacctcgagaagggcaacgtcgatctcttcctcgagaagggcgtcactgtggtggaggcctcggcattcatgaccctcaccccgcaggtcgtgcgctaccgcgccgccggcctctcgcgcaacgccgacggttcggtcaacatccgcaaccgcatcatcggcaaggtctcgcgcaccgagctcgccgagatgttcatccgcccggccccggagcacctcctcgagaagctcatcgcctcgggcgagatcacccaggagcaggccgagctcgcgcgccgcgttcccgtcgccgacgatatcgctgtcgaggctgactcgggcggccacaccgacaaccgccccatccacgtcatcctcccgctcatcatcaacctccgcaaccgcctgcaccgcgagtgcggctaccccgcgcacctccgcgtccgcgttggcgccggcggtggcgtcggctgcccgcaggccgccgccgccgcgctcaccatgggcgccgccttcatcgtcaccggcactgtcaaccaggtcgccaagcagtccggcacctgcgacaacgtgcgcaagcagctctcgcaggccacctactcggatatctgcatggccccggccgccgacatgttcgaggagggcgtcaagctccaggtcctcaagaagggaaccatgttcccctcgcgcgccaacaagctctacgagctcttttgcaagtacgactccttcgactccatgcctcctgccgagctcgagcgcatcgagaagcgtatcttcaagcgcgcactccaggaggtctgggaggagaccaaggacttttacattaacggtctcaagaacccggagaagatccagcgcgccgagcacgaccccaagctcaagatgtcgctctgcttccgctggtaccttggtcttgccagccgctgggccaacatgggcgccccggaccgcgtcatggactaccaggtctggtgtggcccggccattggcgccttcaacgacttcatcaagggcacctacctcgaccccgctgtctccaacgagtacccctgtgtcgtccagatcaacctgcaaatcctccgtggtgcctgctacctgcgccgtctcaacgccctgcgcaacgacccgcgcattgacctcgagaccgaggatgctgcctttgtctacgagcccaccaacgcgctc

SEQ ID NO: 32 - protein, 504 aa, Schizochytrium sp.
APLYLSQDPTSGQLKKHTDVASGQATIVQPCTLGDLGDRSFMETYGVVAPLYTGAMAKGIASADLVIAAGKRKILGSFGAGGLPMHHVRAALEKIQAALPQGPYAVNLIHSPFDSNLEKGNVDLFLEKGVTVVEASAFMTLTPQVVRYRAAGLSRNADGSVNIRNRIIGKVSRTELAEMFIRPAPEHLLEKLIASGEITQEQAELARRVPVADDIAVEADSGGHTDNRPIHVILPLIINLRNRLHRECGYPAHLRVRVGAGGGVGCPQAAAAALTMGAAFIVTGTVNQVAKQSGTCDNVRKQLSQATYSDICMAPAADMFEEGVKLQVLKKGTMFPSRANKLYELFCKYDSFDSMPPAELERIEKRIFKRALQEVWEETKDFYINGLKNPEKIQRAEHDPKLKMSLCFRWYLGLASRWANMGAPDRVMDYQVWCGPAIGAFNDFIKGTYLDPAVSNEYPCVVQINLQILRGACYLRRLNALRNDPRIDLETEDAAFVYEPTNAL

SEQ ID NO: 33 - DNA, 714 bp, Nostoc sp.
atgttgcagcatacttggctaccaaaacccccaaatttaaccttattgtcagatgaagttcatctctggcgcattccccttgaccaaccagaatcacagctacaggatttagccgctaccttatctagtgacgaattagcccgtgcaaacagattttattttcccgaacatcgccggcgttttactgctggtcgtggtattctccgcagtatcttggggggctatttgggtgtggaaccagggcaagttaaatttgattatgaatcccgtggtaaaccaatattaggcgatcgctttgccgagagtggtttattatttaacttgtcacactcccagaacttggccttgtgtgcagtcaattacacgcgccaaatcggcatcgatttagaatatctccgccccacatctgatttagaatcccttgccaaaaggttctttttaccgcgagaatatgaattattgcgatcgctacccgatgagcaaaaacaaaaaattttctttcgttactggacttgtaaagaggcttatcttaaagcaacgggtgacggcatcgctaaattagaggaaattgaaatagcactaactcccacagaaccagctaagttacagacagctccagcgtggagtctcctagagctagtgccagatgataattgtgttgctgctgttgccgtggcgggttttggctggcagccaaaattctggcattattga

SEQ ID NO: 34 - protein, 237 aa, Nostoc sp.
MLQHTWLPKPPNLTLLSDEVHLWRIPLDQPESQLQDLAATLSSDELARANRFYFPEHRRRFTAGRGILRSILGGYLGVEPGQVKFDYESRGKPILGDRFAESGLLFNLSHSQNLALCAVNYTRQIGIDLEYLRPTSDLESLAKRFFLPREYELLRSLPDEQKQKIFFRYWTCKEAYLKATGDGIAKLEEIEIALTPTEPAKLQTAPAWSLLELVPDDNCVAAVAVAGFGWQPKFWHY

SEQ ID NO: 35 - DNA, 8733 bp, Artificial
  synthetic
atggctgctaggttgcaagaacaaaaaggtggtgagatggatactagaattgctatcattggaatgtctgctattttgccatgtggtactactgttagagaatcttgggaaactattagagctggtattgattgtttgtctgatttgcctgaagatagagttgatgttactgcttactttgatccagttaaaactactaaagataaaatctattgtaagagaggtggtttcattccagaatatgattttgatgctagagaatttggtttgaatatgtttcagatggaagattctgatgctaatcaaactatttctttgttgaaagttaaagaagcattgcaagatgctggcatcgatgctttgggtaaagagaagaagaatattggttgtgttttgggtattggtggtggtcaaaaatcttctcatgaattttactcaagattgaattatgttgttgttgagaaggtattgagaaaaatgggtatgccagaagaagatgttaaagttgctgttgaaaaatacaaagctaattttccagagtggagattggattcttttccaggtttcttgggaaatgttactgcaggaagatgtactaatacttttaatcttgatggcatgaattgtgttgttgatgctgcttgtgcttcttctttgattgctgttaaagttgctattgatgaattgttgtacggtgattgtgatatgatggttactggtgctacttgtactgataattctattggaatgtacatggctttttctaaaactccagttttctctactgatccatctgttagagcttatgatgaaaaaactaaaggaatgttgattggtgaaggttctgctatgttggttttgaaaagatatgctgatgctgttagagatggtgatgaaattcatgctgttattagaggttgtgcttcttcttctgatggtaaagctgctggtatctatactccaactatttctggtcaagaagaagcattgagaagagcttataatagagcttgtgttgatccagctactgttactttggttgaaggtcatggtactggtactccagttggtgatagaattgaattgactgctttgagaaatttgtttgataaagcatatggtgaaggtaatactgaaaaagttgctgttggttctattaaatcttctattggtcatttgaaagctgttgctggtttggctggaatgattaaagttatcatggctttgaaacataaaactttgccaggaactattaatgttgataatccaccaaacttgtacgataatactccaattaacgaatcttctttgtacattaatactatgaatagaccttggtttccaccaccaggtgttccaagaagagctggtatttcttcttttggttttggtggtgctaattatcatgctgttttggaagaagctgaaccagaacatactactgcttataggttgaacaaaagaccacaaccagttttgatgatggctgctactccagctgctttgcaatctttgtgtgaagctcaattgaaagaatttgaagctgctattaaagaaaacgaaactgttaaaaatactgcttatattaaatgtgttaaatttggtgaacaattcaaattccctggtagtattccagctactaatgctaggttgggtttcttggttaaagatgctgaagatgcttgttctactttgagagctatttgtgctcaatttgctaaagatgttactaaagaagcatggagattgccaagagaaggtgtttcttttagagctaaaggtattgctactaatggtgctgttgctgctttgttttctggtcaaggtgctcaatatactcatatgttttctgaagttgctatgaattggccacaattcagacaatctattgctgctatggatgctgctcaatctaaagttgctggttctgataaagattttgaaagagtttctcaagttttgtatccaagaaaaccatacgagagagaaccagagcaagatcataagaagatttctttgactgcttattctcaaccatctactttggcttgtgctttgggtgcttttgaaatttttaaagaagctggttttactccagattttgctgctggtcattctttgggtgaatttgctgctttgtacgctgctggttgtgttgatagagatgaattgtttgaattggtttgtagaagagctagaattatgggtggtaaagatgctccagctactccaaaaggttgcatggctgctgttattggtccaaatgctgaaaatattaaagttcaagctgctaatgtttggttaggaaattctaattctccatctcaaactgttattactggttctgttgaaggtattcaagctgaatctgctaggttgcaaaaagaaggttttagagttgttccattggcttgtgaatctgcttttcattctccacagatggaaaatgcttcttctgcttttaaagatgttatctctaaagtttcttttagaactccaaaagctgaaactaaattgttttctaatgtttctggtgaaacttatccaactgatgctagagaaatgttgactcaacatatgacttcttctgttaaatttttgactcaagttagaaatatgcatcaagctggtgctagaatttttgttgaattcggtccaaaacaagttttgtctaaattggtttctgaaactttgaaagatgatccatctgttgttactgtttctgttaatccagcttctggtactgattctgatattcaattgagagatgctgctgttcaattggttgttgctggtgttaatttgcaaggttttgataaatgggatgctccagatgctactagaatgcaagctattaaaaaaaaaagaactactttgagattgtctgctgctacttatgtttctgataaaactaagaaagttagagatgctgctatgaatgatggtagatgtgttacttacttgaaaggtgctgctccattgattaaagctccagaaccagttgttgatgaagctgctaaaagagaagctgaaagattgcaaaaagaattgcaagatgctcaaagacaattggatgatgctaaaagagctgctgctgaagctaattctaaattggctgctgctaaagaagaagctaaaactgctgctgcttctgctaaaccagctgttgatactgctgttgttgaaaaacatagagctattttgaaatctatgttggctgaattggatggttatggttctgttgatgcttcttctttgcaacaacaacaacaacaacaaactgctccagctccagttaaagctgctgctccagctgctccagttgcttctgctccagcacccgcagttagcaacgaactcttagaaaaagccgagacagtagtgatggaagttcttgcagctaaaacggggtacgaaacagatatgattgaagcagatatggaacttgaaactgaactgggcattgattcgattaaacgcgtggaaattctgtcagaagtgcaagctatgttaaatgttgaagcgaaagatgttgatgcactgtcacgcacacgcaccgtgggcgaagtagtgaacgccatgaaagcagaaattgcaggctcctcagcacccgcgccggccgcagcagcaccagcccccgcaaaagccgcccccgcagcggcggctccagccgtttcaaacgaattactcgaaaaagcagaaaccgtagtgatggaagtccttgccgccaaaacgggttatgagaccgatatgatcgaaagcgatatggaattagaaaccgaattagggattgatagtattaaacgcgtagaaattctgtccgaagtacaagctatgctgaatgtagaagcaaaagatgtagatgcgttaagccgcacacgcactgttggtgaagttgtgaatgctatgaaagctgaaattgcaggaggttcagcaccggccccagcagccgcagccccaggtccagcagcagccgcaccggcccccgccgccgccgcaccggcagtatcaaacgagttgttagagaaagcggaaaccgttgtgatggaagtacttgccgcgaagacaggttacgagaccgatatgatcgaaagtgacatggaattagaaaccgaattgggcattgatagcattaaacgcgtagaaattttatccgaagttcaagccatgttaaatgttgaagccaaagatgtggatgcgttatcccgcacgcgtaccgtcggagaagtagtggacgctatgaaagcagagattgcaggaggaagtgcaccggctccagcagcagcagcacccgccccagcggcagcggcgccggcaccggccgctccggccccagccgttagttcagaactcctcgaaaaagcagaaactgttgtcatggaagtattagctgcaaaaacaggttacgagacggatatgattgaaagcgatatggaattagaaaccgaattaggcattgattcaattaaacgtgttgaaatcttaagtgaagtccaagccatgcttaatgttgaagccaaagatgtagatgcattatctcgcacgcgtacagtgggtgaagttgtcgatgcgatgaaagcagaaatcgcgggaggatcagcgccagccccggcagcagcagcccccgcgcccgccgcggccgcacctgcgccggccgccccagcccctgcagcaccggccccagcagtgtcgtcggaattactcgaaaaagctgaaacggtcgttatggaagtacttgctgcaaagacgggctatgaaacggatatgattgaatcggatatggaattagaaacagaacttggtattgactctattaaacgcgtggaaattctgagcgaagtacaggcaatgttaaacgtagaagccaaagatgtagacgctttgtcacgcacacggacggtaggagaagttgtggatgcgatgaaagctgaaattgccggttcaagtgctagcgcccctgctgccgccgcccctgcccctgccgccgcagcaccggccccggcagccgcagctccagcagttagtaacgaattactcgaaaaagcagaaacggtggtcatggaagtgttagcagcaaaaactggatatgaaacggacatgattgaaagcgatatggaattagaaacagaactgggaattgatagtattaaacgtgttgagattttatctgaggttcaagctatgctgaatgttgaagcgaaagatgtagacgcactgtctcggacccgcacagtaggtgaagtggtggacgcgatgaaagcagaaatcgcaggtggaagtgctccggccccggcggcagccgcacccgcgcccgcggccgcagccccagcagttagcaacgaattactcgagaaagcagaaactgtagtgatggaagtgttagccgcaaaaacgggttatgaaacggatatgattgaaagcgatatggaactggaaaccgaactgggcattgattctattaaacgtgtcgaaatcttatcggaagtccaagcaatgctgaacgtagaggcaaaggatgttgatgccctgtcacgtacccgtaccgtaggtgaagttgtagatgccatgaaagctgaaatcgcaggcagtagcgccccggcaccagccgccgccgcccccgcgccggcagccgccgcacccgcgccagccgcagctgctccagctgtatctagtgagctgctcgaaaaagcagaaaccgtggttatggaagtgctcgccgctaaaacaggatatgaaaccgatatgattgaaagcgatatggaattagaaaccgaactgggtattgatagtattaagcgtgttgaaattttgtcagaagttcaagctatgttgaatgtagaagccaaagatgtagacgctttaagtcggacgcgtactgttggagaagtcgtagacgccatgaaagcagagattgcaggcggaagtgcaccggccccggcagcagcagccccagcaccagcggccgccgctcctgcagtgtcaaacgaacttctggaaaaagctgaaaccgtcgtcatggaagtgctggctgcaaaaactggatatgaaacagacatgattgaatcagatatggaactcgaaaccgaactggggattgatagcattaaacgtgtggaaattttatcggaggtacaagcaatgttaaatgtggaagcaaaagatgtggatgcactgagccgtactcgtactgttggtgaggtcgtggatgcgatgaaagcagaaattgctggagggagtgcgcctgccccggccgccgccgcacccgcgtctgccggtgctgcccccgctgtcaaaattgattctgttcatggtgctgattgtgatgatttgtctttgatgcatgctaaagttgttgatattagaagaccagatgaattgattttggaaagaccagaaaatagaccagttttggttgttgatgatggttctgaattgactttggctttggttagagttttgggtgcttgtgctgttgttttgacttttgaaggtttgcaattggctcaaagagctggtgctgctgctattagacatgttttggctaaagatttgtctgctgaatctgctgaaaaagctattaaagaagctgaacaaagatttggtgctttgggtggttttatctctcaacaagctgaaagatttgaaccagctgaaattttgggttttactttgatgtgtgctaaatttgctaaagcatctttgtgcactgctgttgctggtggtagaccagctttcattggtgttgctaggttggatggtaggttgggttttacttctcaaggaacttctgatgctttgaaaagagctcaaagaggtgctatttttggtttgtgcaagactattggtttggaatggtctgaatctgatgttttctcaagaggtgttgatattgctcaaggtatgcatccagaagatgctgctgttgctattgttagagaaatggcttgtgctgatattagaattagagaagttggtattggtgctaatcaacaaagatgtactattagagctgctaaattggaaactggaaatccacaaagacaaattgctaaagatgatgttttgttggtttctggtggtgctagaggaattactccattgtgcattagagaaattactagacaaattgctggtggaaagtatattttgttgggtaggtctaaagtttctgcttctgaaccagcttggtgtgctggtattactgatgaaaaagctgttcaaaaagctgctactcaagaattgaaaagagctttttctgctggtgaaggtccaaaaccaactccaagagctgttactaaattggttggttctgttttgggtgctagagaagttaggtcttctattgctgctattgaagcattgggtggaaaagctatctattcttcttgtgatgttaattctgctgctgatgttgctaaagctgttagagatgctgaatctcaattgggtgctagagtttctggtattgttcatgcttctggtgttttgagagataggttgattgaaaaaaaattgccagatgaatttgatgctgtttttggtactaaagttactggtttggaaaatttgttggctgctgttgatagagctaatttgaaacatatggttttgttttcttctttggctggttttcatggtaatgttggtcaatctgattatgctatggctaacgaagcattgaacaaaatgggtttggaattggctaaagatgtttctgttaaatctatttgttttggtccttgggatggtggtatggttactccacaattgaaaaaacaatttcaagaaatgggtgttcaaattattccaagagaaggtggtgctgatactgttgctagaattgttttgggttcttctccagctgaaattttggttggtaattggagaactccatctaaaaaagttggttctgatactattactttgcacagaaaaatttctgctaaatctaatccatttttggaagatcatgtcattcaaggtagaagagttttgccaatgactttggctattggttctttggctgaaacttgtttgggtttgtttcctggatattctttgtgggctattgatgatgctcaattgtttaaaggtgttactgttgatggtgatgttaattgtgaagttactttgactccatctactgctccttctggtagagttaatgttcaagctactttgaaaactttttcttctggtaaattggttccagcttatagagctgttattgttttgtctaatcaaggtgctccaccagctaatgctactatgcaaccaccatctttggatgctgatccagctttgcaaggttctgtttatgatggaaagactttgtttcatggtccagcttttagaggtattgatgatgttttgtcttgtactaaatctcaattggttgctaaatgttctgctgttccaggttctgatgctgctagaggtgaatttgctactgatactgatgctcatgatccatttgttaatgatttggcttttcaagctatgttggtttgggttagaagaactttgggtcaagctgctttgccaaattctattcaaagaattgttcaacacagaccagttccacaagataaaccattttatattactttgagatctaatcaatctggtggtcattctcaacataaacatgctttgcaatttcataacgaacaaggtgatttgttcattgatgttcaagcatctgttattgctactgattctttggctttttaa

SEQ ID NO: 36 - DNA, 6180 bp, Artificial
  synthetic
atggctgctagaaatgtttctgctgctcatgaaatgcatgatgaaaaaagaattgctgttgttggtatggctgttcaatatgctggttgtaagactaaagatgaattttgggaagttttgatgaatggtaaagttgaatctaaagttatctctgataaaagattgggttctaattaccgagctgaacattacaaggctgaaagatccaaatacgctgatactttttgtaacgaaacttatggtactttggatgaaaacgaaattgataacgaacatgaattgttgttgaatttggctaaacaagcattggctgaaacttctgttaaagattctactagatgtggtattgtttctggttgtttgtcttttcctatggataatttgcaaggtgaattgttgaatgtctatcaaaatcatgttgagaagaaattgggtgctagagtttttaaagatgcttctcattggtctgaaagagaacaatctaacaaaccagaagctggtgatagaagaattttcatggacccagcttcttttgttgctgaagaattgaatttgggtgctttgcattattctgttgatgctgcttgtgctactgctttatacgttttgagattggctcaagatcatttggtttctggtgctgctgatgttatgttgtgtggtgctacttgtttgccagaaccattctttatcttgtctggtttttctacttttcaagctatgccagttggtactggtcaaaatgtttctatgccattgcataaagattctcaaggtttgactccaggtgaaggtggttctatcatggttttgaaaagattggatgatgctattagagatggtgatcatatctatggtactttgttgggtgctaatgtttctaattctggcactggtttgccattgaaaccattgttgccatctgaaaaaaaatgtttgatggatacttatactagaattaatgttcatccacataaaattcaatatgttgaatgtcatgctactggtactccacaaggtgatagggttgaaattgatgctgttaaagcatgttttgaaggaaaagttccaagatttggtactactaaaggaaactttggtcatactttggttgctgctggttttgctggaatgtgcaaagttttgttgtctatgaaacatggtatcattccaccaactccaggtattgatgatgaaactaagatggacccattggttgtttctggtgaagctattccttggccagaaactaatggtgaaccaaaaagagctggtttgtctgcttttggttttggtggtactaatgctcatgctgtttttgaagaacatgatccatctaatgctgcttgtactggtcatgattctatttctgctttgtctgctagatgtggtggtgaatctaatatgagaattgctattactggtatggatgctacttttggtgctttgaaaggtttggatgcttttgaaagagccatctacactggtgctcatggtgctattccattgccagaaaagagatggagatttttgggcaaagataaagatttcttggatttgtgtggtgttaaagctactccacatggttgttatattgaagatgttgaagttgattttcaaagattgagaactccaatgactccagaagatatgttgttgccacaacaattgttggctgttactactattgatagagctattttggattctggtatgaaaaaaggtggtaatgttgctgtttttgttggtttgggtaccgatttggaattgtacagacatagagctagagttgctttgaaagaaagagttagaccagaagcatctaaaaaattgaatgatatgatgcagtacattaatgattgtggcacctctacttcttatacttcttatattggtaatttggttgctactagagtttcttctcaatggggttttactggtccatcttttactattactgaagggaataactctgtttatagatgtgctgaattgggaaagtatttgttggaaactggtgaagttgatggtgttgttgttgctggtgttgatttgtgtggttctgctgaaaacttatacgttaaatcaagaagattcaaagtttctacttctgatactccaagagcttcttttgatgctgctgctgatggttactttgttggtgaaggttgtggtgcttttgttttgaaaagagaaacttcttgtactaaagatgatagaatctatgcttgcatggatgctattgttccaggtaatgttccatctgcttgtttgagagaagcattggatcaagctagagttaaaccaggtgatattgaaatgttggaattgtctgctgattctgctagacatttgaaagatccatctgttttgccaaaagaattgactgctgaagaagaaattggtggtttgcaaactattttgagagatgatgataaattgccaagaaatgttgctactggttctgttaaagctactgttggtgatactggttatgcttctggtgctgcttctttgattaaagctgctttgtgcatctataataggtatttgccatctaatggtgatgattgggatgaaccagctccagaagctccttgggattctactttgtttgcttgtcaaacttcaagagcttggttgaaaaatcctggagagagaagatatgctgctgtttctggtgtttctgaaactaggtcttgttattctgttttgttgtctgaagctgaaggtcattatgaaagagaaaatagaatttctttggatgaagaagctccaaaattgattgttttgagagctgattctcatgaagaaattttgggtaggttggataaaattagagaaagatttttgcaaccaactggtgctgctccaagagaatctgaattgaaagctcaagctagaagaattttcttggaattgttgggtgaaactttggctcaagatgctgcttcttctggttctcaaaaaccattggctttgtctttggtttctactccatctaaattgcaaagagaagttgaattggctgctaaaggtattccaagatgtttgaaaatgagaagagattggtcttctccagctggttcaagatatgctccagaaccattggcttctgatagagttgctttcatgtacggtgaaggaaggtctccatactatggaatcactcaagatattcatagaatttggccagaattgcatgaagttattaacgaaaaaactaataggttgtgggctgaaggtgatagatgggttatgccaagagcttcttttaaatctgaattggaatctcaacaacaagaatttgatagaaatatgattgaaatgtttaggttgggtattttgacttctattgcttttactaatttggctagagatgttttgaatattactccaaaagctgcttttggtttgtctttgggtgaaatttctatgatttttgctttttctaaaaaaaatggtttgatttctgatcaattgactaaagatttgagagaatctgatgtttggaacaaagcattggctgttgaattcaatgctttgagagaagcatggggtattccacaatctgttccaaaagatgaattttggcaaggttatattgttagaggtactaaacaagatattgaagctgctattgctccagattccaaatacgttaggttgactatcattaatgatgctaatactgctttgatttctggtaaaccagatgcttgtaaagctgctattgctaggttgggtggtaatattccagctttgccagttactcaaggaatgtgtggtcattgtccagaagttggtccatatactaaagatattgctaaaattcatgctaatttggaatttccagttgttgatggtttggatttgtggactactattaatcaaaaaagattggttccaagagctactggtgctaaagatgaatgggctccatcttcttttggtgaatatgctggtcaactttacgaaaaacaagctaattttccacaaattgttgaaactatctacaaacaaaattatgatgtttttgttgaggttggtccaaacaaccataggtctactgctgttagaactactttgggtccacaaagaaatcatttggctggtgctattgataaacaaaacgaagatgcttggactactattgttaaattggttgcttctttgaaagctcatttggttccaggtgttactatttctccattgtatcattctaaattggttgctgaagctgaagcatgttatgctgctctgtgcaaaggagaaaaacctaagaagaacaaatttgttagaaaaattcaattgaatggtaggttcaattctaaagctgatccaatttcttctgctgatttggcttcttttccaccagctgatccagctattgaagctgctatttcttcaagaattatgaaaccagttgctccaaaattttatgctaggttgaatattgatgaacaagacgaaacaagagatccaattttgaacaaagataatgctccatctagttcatctagttcctcttcatctagttcttcatctagttctccatctccagctccttctgctccagttcaaaaaaaagctgctccagctgctgaaactaaagctgttgcttctgctgatgctttgagatctgctttgttggatttggattctatgttggctttgtcttctgcttctgcttctggtaatttggttgaaactgctccatctgatgcttctgttattgttccaccatgtaatattgctgatttgggttcaagagcttttatgaaaacttatggtgtttctgctccattgtacactggtgctatggctaaaggtattgcttctgctgatttggttattgctgctggtagacaaggcattttggcttcttttggtgctggtggtttgccaatgcaagttgttagagaatctattgaaaaaattcaagctgctttgccaaatggtccatatgctgttaatttgattcattctccatttgattctaatttggaaaaaggtaatgttgatttgtttttggaaaaaggtgttacttttgttgaagcatctgcttttatgactttgactccacaagttgttaggtacagagctgctggtttgactagaaatgctgatggttctgttaatattagaaatagaattatcggaaaggtttcaagaactgaattggctgaaatgtttatgagacctgccccagaacacttgttgcaaaaattgattgcttctggtgaaattaatcaagaacaagctgaattggctagaagagttccagttgctgatgatattgctgttgaagctgattctggtggtcatactgataatagaccaattcatgttatcttgccattgattattaatttgagagacagattgcatagagaatgtggttatccagctaatttgagagttagagttggtgctggtggtggtattggttgtccacaagctgctttggctacttttaatatgggtgcttctttcattgttactggcactgttaatcaagttgctaaacaatctggtacttgtgataatgttagaaaacaattggctaaagctacttattctgatgtttgcatggctccagctgctgatatgtttgaagaaggtgttaaattgcaagttttgaagaaagggacaatgtttccatcaagagctaataagttatacgaattgttttgcaagtatgattcttttgaatctatgccaccagctgaattggctagagttgaaaaaagaattttctcaagagctttggaagaagtttgggatgaaactaaaaatttttacattaataggttgcacaatccagaaaaaattcaaagagctgaaagagatccaaaattgaaaatgtctttgtgttttagatggtatttgtctttggcttcaagatgggctaatactggtgcttctgatagagttatggattatcaagtttggtgtggtccagctattggttcttttaatgatttcattaaaggcacctacttggacccagctgttgctaacgaatatccatgcgttgttcaaattaacaaacaaattttgagaggtgcttgtttcctcagaagattggaaattttgagaaatgctaggttgtctgatggtgctgctgctttggttgcttctattgatgatacttatgttccagctgaaaaattgtaa

SEQ ID NO: 37 - DNA, 6180 bp, Artificial
  synthetic
atggccgctcgcaacgtgtctgcagcgcatgagatgcacgatgaaaagcgcatcgccgtcgtcggcatggccgtccagtacgccggatgcaaaaccaaggacgagttctgggaggtgctcatgaacggcaaggtcgagtccaaggtgatcagcgacaaacgactcggctccaactaccgcgccgagcactacaaagcagagcgcagcaagtatgccgacaccttttgcaacgaaacgtacggcacccttgacgagaacgagatcgacaacgagcacgaactcctcctcaacctcgccaagcaggcactcgcagagacatccgtcaaagactcgacacgctgcggcatcgtcagcggctgcctctcgttccccatggacaacctccagggtgaactcctcaacgtgtaccaaaaccatgtcgagaaaaagctcggggcccgcgtcttcaaggacgcctcccattggtccgaacgcgagcagtccaacaaacccgaggccggtgaccgccgcatcttcatggacccggcctccttcgtcgccgaagaactcaacctcggcgcccttcactactccgtcgacgcagcatgcgccacggcgctctacgtgctccgcctcgcgcaggatcatctcgtctccggcgccgccgacgtcatgctctgcggtgccacctgcctgccggagccctttttcatcctttcgggcttttccaccttccaggccatgcccgtcggcacgggccagaacgtgtccatgccgctgcacaaggacagccagggcctcaccccgggtgagggcggctccatcatggtcctcaagcgtctcgatgatgccatccgcgacggcgaccacatctacggcacccttctcggcgccaatgtcagcaactccggcacaggtctgcccctcaagccccttctccccagcgagaaaaagtgcctcatggacacctacacgcgcattaacgtgcacccgcacaagattcagtacgtcgagtgccacgccaccggcacgccccagggtgatcgtgtggaaatcgacgccgtcaaggcctgctttgaaggcaaggtcccccgtttcggtaccacaaagggcaactttggacacaccctcgtcgcagccggctttgccggtatgtgcaaggtcctcctctccatgaagcatggcatcatcccgcccaccccgggtatcgatgacgagaccaagatggaccctctcgtcgtctccggtgaggccatcccatggccagagaccaacggcgagcccaagcgcgccggtctctcggcctttggctttggtggcaccaacgcccatgccgtctttgaggagcatgacccctccaacgccgcctgcacgggccacgactccatttctgcgctctcggcccgctgcggcggtgaaagcaacatgcgcatcgccatcactggtatggacgccacctttggcgctctcaagggactcgacgccttcgagcgcgccatttacaccggcgctcacggtgccatcccactcccagaaaagcgctggcgctttctcggcaaggacaaggactttcttgacctctgcggcgtcaaggccaccccgcacggctgctacattgaagatgttgaggtcgacttccagcgcctccgcacgcccatgacccctgaagacatgctcctccctcagcagcttctggccgtcaccaccattgaccgcgccatcctcgactcgggaatgaaaaagggtggcaatgtcgccgtctttgtcggcctcggcaccgacctcgagctctaccgtcaccgtgctcgcgtcgctctcaaggagcgcgtccgccctgaagcctccaagaagctcaatgacatgatgcagtacattaacgactgcggcacatccacatcgtacacctcgtacattggcaacctcgtcgccacgcgcgtctcgtcgcagtggggcttcacgggcccctcctttacgatcaccgagggcaacaactccgtctaccgctgcgccgagctcggcaagtacctcctcgagaccggcgaggtcgatggcgtcgtcgttgcgggtgtcgatctctgcggcagtgccgaaaacctttacgtcaagtctcgccgcttcaaggtgtccacctccgataccccgcgcgccagctttgacgccgccgccgatggctactttgtcggcgagggctgcggtgcctttgtgctcaagcgtgagactagctgcaccaaggacgaccgtatctacgcttgcatggatgccatcgtccctggcaacgtccctagcgcctgcttgcgcgaggccctcgaccaggcgcgcgtcaagccgggcgatatcgagatgctcgagctcagcgccgactccgcccgccacctcaaggacccgtccgtcctgcccaaggagctcactgccgaggaggaaatcggcggccttcagacgatccttcgtgacgatgacaagctcccgcgcaacgtcgcaacgggcagtgtcaaggccaccgtcggtgacaccggttatgcctctggtgctgccagcctcatcaaggctgcgctttgcatctacaaccgctacctgcccagcaacggcgacgactgggatgaacccgcccctgaggcgccctgggacagcaccctctttgcgtgccagacctcgcgcgcttggctcaagaaccctggcgagcgtcgctatgcggccgtctcgggcgtctccgagacgcgctcgtgctattccgtgctcctctccgaagccgagggccactacgagcgcgagaaccgcatctcgctcgacgaggaggcgcccaagctcattgtgcttcgcgccgactcccacgaggagatccttggtcgcctcgacaagatccgcgagcgcttcttgcagcccacgggcgccgccccgcgcgagtccgagctcaaggcgcaggcccgccgcatcttcctcgagctcctcggcgagacccttgcccaggatgccgcttcttcaggctcgcaaaagcccctcgctctcagcctcgtctccacgccctccaagctccagcgcgaggtcgagctcgcggccaagggtatcccgcgctgcctcaagatgcgccgcgattggagctcccctgctggcagccgctacgcgcctgagccgctcgccagcgaccgcgtcgccttcatgtacggcgaaggtcgcagcccttactacggcatcacccaagacattcaccgcatttggcccgaactccacgaggtcatcaacgaaaagacgaaccgtctctgggccgaaggcgaccgctgggtcatgccgcgcgccagcttcaagtcggagctcgagagccagcagcaagagtttgatcgcaacatgattgaaatgttccgtcttggaatcctcacctcaattgccttcaccaatctggcgcgcgacgttctcaacatcacgcccaaggccgcctttggcctcagtcttggcgagatttccatgatttttgccttttccaagaagaacggtctcatctccgaccagctcaccaaggatcttcgcgagtccgacgtgtggaacaaggctctggccgttgaatttaatgcgctgcgcgaggcctggggcattccacagagtgtccccaaggacgagttctggcaaggctacattgtgcgcggcaccaagcaggatatcgaggcggccatcgccccggacagcaagtacgtgcgcctcaccatcatcaatgatgccaacaccgccctcattagcggcaagcccgacgcctgcaaggctgcgatcgcgcgtctcggtggcaacattcctgcgcttcccgtgacccagggcatgtgcggccactgccccgaggtgggaccttataccaaggatatcgccaagatccatgccaaccttgagttccccgttgtcgacggccttgacctctggaccacaatcaaccagaagcgcctcgtgccacgcgccacgggcgccaaggacgaatgggccccttcttcctttggcgagtacgccggccagctctacgagaagcaggctaacttcccccaaatcgtcgagaccatttacaagcaaaactacgacgtctttgtcgaggttgggcccaacaaccaccgtagcaccgcagtgcgcaccacgcttggtccccagcgcaaccaccttgctggcgccatcgacaagcagaacgaggatgcttggacgaccatcgtcaagcttgtggcttcgctcaaggcccaccttgttcctggcgtcacgatctcgccgctgtaccactccaagcttgtggcggaggctgaggcttgctacgctgcgctctgcaagggtgaaaagcccaagaagaacaagtttgtgcgcaagattcagctcaacggtcgcttcaacagcaaggcggaccccatctcctcggccgatcttgccagctttccgcctgcggaccctgccattgaagccgccatctcgagccgcatcatgaagccggttgctccgaagttctacgcgcgtctcaacattgacgagcaggacgagacccgtgatccgatcctcaacaaggacaacgcgccgtcttccagctctagctcctcttccagctcttccagctcttccagcccgtcgccagctccgtccgccccagtgcaaaagaaggctgctccggccgcggagaccaaggctgttgcttcggctgacgcacttcgcagtgccctgctcgatctcgacagtatgcttgcgctgagctctgccagtgcctccggcaaccttgttgagactgcgcctagcgacgcctcggtcattgtgccgccctgcaacattgcggatctcggcagccgcgccttcatgaaaacgtacggtgtttcggcgcctctgtacacgggcgccatggccaagggcattgcctctgcggacctcgtcattgccgccggccgccagggcatccttgcgtcctttggcgccggcggacttcccatgcaggttgtgcgtgagtccatcgaaaagattcaggccgccctgcccaatggcccgtacgctgtcaaccttatccattctccctttgacagcaacctcgaaaagggcaatgtcgatctcttcctcgagaagggtgtcacctttgtcgaggcctcggcctttatgacgctcaccccgcaggtcgtgcggtaccgcgcggctggcctcacgcgcaacgccgacggctcggtcaacatccgcaaccgtatcattggcaaggtctcgcgcaccgagctcgccgagatgttcatgcgtcctgcgcccgagcaccttcttcagaagctcattgcttccggcgagatcaaccaggagcaggccgagctcgcccgccgtgttcccgtcgctgacgacatcgcggtcgaagctgactcgggtggccacaccgacaaccgccccatccacgtcattctgcccctcatcatcaaccttcgcgaccgccttcaccgcgagtgcggctacccggccaaccttcgcgtccgtgtgggcgccggcggtggcattgggtgcccccaggcggcgctggccaccttcaacatgggtgcctcctttattgtcaccggcaccgtgaaccaggtcgccaagcagtcgggcacgtgcgacaatgtgcgcaagcagctcgcgaaggccacttactcggacgtatgcatggccccggctgccgacatgttcgaggaaggcgtcaagcttcaggtcctcaagaagggaaccatgtttccctcgcgcgccaacaagctctacgagctcttttgcaagtacgactcgttcgagtccatgccccccgcagagcttgcgcgcgtcgagaagcgcatcttcagccgcgcgctcgaagaggtctgggacgagaccaaaaacttttacattaaccgtcttcacaacccggagaagatccagcgcgccgagcgcgaccccaagctcaagatgtcgctgtgctttcgctggtacctgagcctggcgagccgctgggccaacactggagcttccgatcgcgtcatggactaccaggtctggtgcggtcctgccattggttccttcaacgatttcatcaagggaacttaccttgatccggccgtcgcaaacgagtacccgtgcgtcgttcagattaacaagcagatccttcgtggagcgtgcttcttgcgccgtctcgaaattctgcgcaacgcacgcctttccgatggcgctgccgctcttgtggccagcatcgatgacacatacgtcccggccgagaagctgtaa

SEQ ID NO: 38 - DNA, 8436 bp, Thraustochytrium sp.
  CDS (1)..(8433)
atgaaggacatggaagatagacgggtcgctattgtgggcatgtcagctcacttgccttgtgggacagatgtgaaggaatcatggcaggctattcgcgatggaatcgactgtctaagtgacctacccgcggatcgtctcgacgttacagcttactacaatcccaacaaagccacgaaagacaagatctactgcaaacggggtggcttcatcccgaactatgacttcgacccccgcgaatttgggctcaacatgtttcaaatggaagactctgatgcgaatcagacacttaccttgctcaaagtcaaacaagctctcgaagatgcaagcatagagcctttcaccaaggagaagaagaacattggatgtgttttaggtattggtgggggccaaaaggcgagtcatgagttctactctcgtctcaactacgttgtcgttgaaaaggtacttcggaaaatgggtttaccagatgctgatgttgaagaagctgtggagaaatacaaggcaaattttcccgagtggcgcctagactctttccctgggtttcttgggaatgtaacggctggtcggtgcagtaacaccttcaacatggaaggtatgaactgcgttgtggatgctgcatgtgccagttctctaattgcaatcaaggttgcagttgaagagctactctttggtgactgtgacaccatgattgcaggtgccacctgcacggacaattcacttggcatgtacatggccttctctaaaacgccagttttttctactgacccaagtgtccgcgcgtatgatgagaaaacaaaagggatgctaattggagaaggttcagcaatgttcgttcttaaacgctatgcggatgccgtacgtgatggcgacacaattcacgcggttctgcgttcttgctcttcgtctagtgatggaaaagcggcaggaatttatactcctactatatctggacaagaagaagctttgcgtcgagcgtatgcccgtgcgggggtatgtccatctacgatcgggcttgttgagggtcacgggacagggacccctgttggagatcgcattgagttaacagctctgcggaacttgtttgacaaagcttttggtagcaagaaggaacaaatagcagttggcagcataaagtctcagataggtcacctgaaatctgttgccggctttgccggcttggtcaaagctgtgcttgcgcttaaacacaaaacgctcccaggttcgattaatgtcgaccagccacctttgttgtatgacggtactcaaattcaagactcttctttatatatcaacaagacaaatagaccatggtttacgcaaaacaagcttccgcgtcgggctggtgtctcaagttttggatttggaggtgcaaactaccacgcggttctggaagaattcgagcccgagcatgaaaaaccataccgcctcaatactgttggacatcctgtcctcttgtacgctccgtctgtggaagccctcaaagtactttgcaacgaccagcttgcggagctcacaattgcattggaagaggcaaaaacacataaaaatgttgacaaagtttgtggctacaagtttattgacgaatttcagctccaaggaagctgtcctccagaaaatccgagagtaggatttttagcaacactgcctacttcaaatatcattgtcgcgcttaaggcaattctcgcgcagcttgatgcaaaaccagatgcgaagaaatgggatttgcctcataaaaaggcttttggggctaccttcgcatcgtcttcagtgaaaggctctgttgctgcgctcttcgcaggacagggtacccagtacttaaacatgttctctgatgtggcaatgaactggccaccgttccgtgacagcattgtcgcaatggaagaagctcaaactgaggtatttgagggccaagttgaaccaattagcaaagttctgtttccacgagagcgctatgcatccgaaagtgaacaggggaatgaacttctttgcttaacagagtactctcagccaactacgatagcagccgcagtaggggccttcgatattttcaaagcggctggctttaagccagacatggttggagggcattcacttggcgaatttgctgctttgtacgcggctgggtccatttcgcgtgacgacctgtacaagcttgtgtgcaaacgggcaaaggcaatggcgaacgctagtgacggagctatggcagcagtgattggcccagatgcacgtctagttacgccacaaaatagtgacgtttatgtcgcaaacttcaactccgcaactcaagtagtcatcagtggcactgttcaaggtgtgaaagaagagtcgaaattgctcatttcaaaggggttccgcgtactgccacttaaatgccagggcgccttccattctcctttgatggggccttctgaggatagtttcaaatcacttgtggagacttgtaccatctcgccgccaaaaaatgtgaaattcttttgcaatgttagtggcaaggaaagcccaaacccaaaacagaccctcaagtcacacatgacgtctagcgttcagttcgaggagcagattcgtaacatgtacgatgccggagcacgtgtttttctggagtttggaccccgccaagtccttgcaaagcttatcgcggaaatgtttccctcgtgtacagctatcagcgttaaccccgcgagcagtggtgacagtgacgtgcaactccgcctcgccgccgtaaaattcgcggtctcgggtgcagcccttagcacctttgatccatgggagtatcgcaagccacaagatcttcttattcgaaaaccacgaaaaactgcccttgttctatcagcagcaacatatgtttccccaaagactcttgcagaacgtaaaaaggctatggaagatatcaagctagtatccattacaccaagagatagtatggtatcaattggaaaaatcgcgcaagaagtacggacagctaaacagcctttagaaaccgaaattcgaagactcaacaaagaattagaacatctcaagagagagctagcagcagccaaagcgagtgtcaagtctgcatcaaaaagctctaaagagcgatctgtcctatcaaagcaccgcgctttgcttcaaaacattttgcaagactacgatgatcttcgtgtggtgccattcgctgttcgttctgttgcagtggacaacaccgcgccgtatgctgaccaagtttcgaccccagcgtcagagcggtcggcttcaccgcttttcgagaaacgcagttcggtttcgtcagcacgcctcgctgaagctgaagccgcggtactgagcgttctcgcagacaagacaggctacgacagctcaatgatcgagatggacatggacctggagagtgagcttggcgttgatagcatcaaacgcgtggagatcatgagcgaggttcaaacgctgctcagcgtggaagtctccgacgttgacgctctgtcaagaaccaagactgttggcgacgtcatcgaggcgatgaagctggaactcggtggaccccaaggccagactttgaccgcggaatcgatccgtcagccaccggtgtccgagcctgctgtaccgacctcatcgtcaagcagtattgctaatgtttcgtcagcacgcctcgctgaagctgaagctgcggtactgagcgttctcgcagacaagacaggctacgacagctcaatgatcgagatggacatggacctggagagcgagcttggcgttgatagcatcaaacgcgtggagatcatgagcgaggttcaaacgctgctcagcgtggaagtctccgacgttgacgctctgtcaagaactaagactgttggcgacgtcatcgaggcgatgaagctggaactcggtggaccccaaggccagactttgaccgcggaatcgatccgtcagccaccggtgtctgagcctgctgtaccgacctcatcgtcaagcagtattgctaatgtttcgtcagcacgcctcgctgaagctgaagcggcggtactgagcgttctcgcagacaagacaggctacgacagctcaatgatcgagatggacatggacctggagagcgagcttggcgtcgacagcatcaaacgcgtggagatcatgagcgaggttcaaacgctgctcagcgtggaagtctccgacgttgacgctctgtcaagaaccaagactgttggcgacgtcatcgaggcgatgaagctggaactcggtggaccccaaggccagactttgaccgcggaatcgatccgtcagccaccggtgtccgagcctgctgtaccgacctcatcgtcaagcagtattgctaatgttttgtcagcacgcctcgctgaagctgaagccgcggtactgagcgttctcgcagacaagacaggctacgacagctcaatgatcgagatggacatggacctggagagcgagcttggcgttgatagcatcaaacgcgtggagatcatgagcgaggttcaaacgttgctcagcgtggaagtctccgacgttgacgctctgtcaagaaccaagactgttggcgacgtcatcgaggcgatgaagctggaactcggtggaccccaaggccagactttgaccgcggaatcgatccgtcagccaccggtgtctgagcctgctgtaccgacctcatcgtcaagcagtattgctaatgtttcgtcagcacgcctcgctgaagctgaagccgcggtactgagcgttctcgcagacaagacaggctacgacagctcaatgatcgagatggacatggacctggagagtgagcttggcgtcgacagcatcaaacgcgtggagatcatgagcgaggttcaaacgctgctcagcgtggaagtctccgacgttgacgctctgtcaagaaccaagactgttggcgacgtcatcgaggcgatgaagctggaactcggtggaccccaaggccagactttgacctctgaaccgatccatcagccaccagtgtccgagcctgctgtaccgacctcatcgtcaagcagtattgctaatgtttcttcagcacgcctcgctgaagctgaagccgcggtactgagcgttctcgcagacaagacaggctacgacagctcaatgatcgagatggacatggacctggagagcgagcttggcgttgatagcatcaaacgcgtggaaatcatgagcgaggttcaaacgctgctcagcgtggaagtctccgacgttgacgctctgtcaagaaccaagactgttggcgacgtcatcgaggcgatgaagatggaactcggtggaccccaaggccagactttgaccgcggaatcgatccgtcagccaccggtgtctgagcctgctgtaccgacctcatcgtcaagcagtattgctaatgtttcgtcagcacgcctcgctgaagctgaagcggcggtactgagcgttctcgcagacaagacaggctacgacagctcaatgatcgagatggacatggacctggagagcgagcttggcgttgatagcatcaaacgcgtggagatcatgagcgaggttcaagcgctgctcagcgtggaagtctccgacgttgacgctctgtcaagaaccaagactgttggcgacgtcatcgaggcgatgaagatggaactcggtggaccccaaggccagactttgaccgcagaatcgatccgtgagccaccggtgtctgagcctgctgtaccgacctcatcgtcaagtagtatcgctaatgtttcttcagctcgcctcgctgaagctgaagccgcggtactgagcgttctcgcagacaagacaggctacgacagctcaatgatcgagatggacatggacctggagagtgagcttggcgtcgacagcatcaaacgcgtggagatcatgagcgaggttcaaacgttgctcagcgtggaagtctccgacgttgacgctctgtcaagaaccaagactgttggcgacgtcatcgaggcgatgaagctggaacttggggaatcatcaagtattgagactctcaattgtaccgaggttgagcacacgagctacaaaagtgtcaaggcttcagggtgtgagaatgtagatacccgtttcgctaaggttgtacaaatctcgcttcctagcaagctgaaatccactgtgtcgcacgatcgacctgtaattgttgtagatgatggaacgcccttaaccacggagctttgtaaaattcttgggggtaatattgtggttctctcttatcaagggaagcccgctggtccacggggagtcgaggtgccagatctttccgaggaagccctaattcaagctcttgcattgattcggtctacatatggagttccaattggttttatttgtcagcaagtgtctaatgtgagcaccaaggcacagctttgttgggcactcctcgcagcgaagcatctcaagaaggatttgaatgctgtcttacccgattcaagatccttcttcgtcggagttgtacgcttgaacgggaaacttggaactttcgaaaacatcagcgacttctctaaatttgatttgacgaaagccctagattacggacagcgtggttctctcttaggcctgtgcaagtcactagacttagaatgggaacaggtgttttgccgtggaatagatcttgcgtgtgatcttatgccactccaggccgcaaggatactcagaaatgagcttcagtgtcccaatatgcgccttcgcgaggttgggtacgatatttctggcgccaggtacaccatttcaaccgatgacctgctatgtggaccctcgaaggctaaagtagaggccgcagacttgtttcttgtgacaggtggcgcacgaggtattacacctcattgtgttcgtgagattgcaagtcgatcccccggaaccacatttgtgctggttggaagaagcgaaatgtccgacgagcctgactgggctgttggccactacaataaagacctggaccaaagcacaatgaaacacttgaaagcaacgcatgctgctggaggggtaaaacctacgcctaaagcacatcgtgcacttgtgaacagggtcactggctcacgggaggtacgagaatctcttagagcaatccaggaggcaggggcaaatgtcgaatatatcgcctgtgatgtttcggatgaaaacaaggtccgccaacttgtgcaaagagtggagcaaaagtatggctgtgaaataactgggatttggcatgcaagcggggttcttcgtgacaaacttgtcgagcaaaagactacagacgactttgaggcagtttttgggaccaaggtgactggccttgtaaacatcgtgtcacaagtcaatatgtctaagctacgacacttcatcctcttcagttctttggctggatttcatgggaacaagggccaaacggattatgcaattgctaatgaagccttgaacaaaatcgcgcatactctctcagcgtttttgcccaaactgaatgcaaaggtgctagacttcggtccgtgggtaggttcaggaatggtaaccgaaacacttgagaagcattttaaagctatgggggttcagactattcctctcgagccaggagcacggactgttgcgcaaatcattttggcaagttcgccaccgcaatcgcttttggggaactggggctttccagccaccaaaccgctacaacgctctaatgtagtcacgggcacactctctccggaagagatagaattcatcgcagaccacaaaattcaaggccgcaaggtgcttcccatgatggctgcaatcgggttcatggcctctattgcggaaggactctacccggggtacaatctgcaaggcgtggaaaatgctcagctctttcaaggcttgactatcaaccaagagacaaaatttcaaatcactctcattgaggagcacaactctgaggaaaacctggatgtcctgacatcccttggtgtaatgttggaaagcgggaaggtgcttcccgcttaccgatgtgttgtatgcttgaatacaacccagcagcagcccaagctatctccaaaaattcttaacttggaagttgaccctgcatgcgaggttaacccctatgatggaaagtcgttgttccacggtccgcttttgcaattcgttcaacaagtgttgcactcaagtaccaaaggcctcgttgccaagtgccgcgcgcttccaatcaaagaagccatccgagggccatttatcaagcaaacactccatgatccaattctagacgacgtcatttttcagctaatgctcgtgtggtgtcgtaatgctctaggaagtgcatcgctacccaacagaattgaaaagatgtcatactttgggaatgtctcagaaggtagcactttctttgcctcagttacacctgtgggaccaagagtaccaaaggatcccgtgatcaaaatgcagtttcttctccaagatgaatccggcaacacattttcatcgggggagggctcggttgtgcttagtgacgaactcgtcttttga

SEQ ID NO: 39 - protein, 2811 aa, Thraustochytrium sp.
MKDMEDRRVAIVGMSAHLPCGTDVKESWQAIRDGIDCLSDLPADRLDVTAYYNPNKATKDKIYCKRGGFIPNYDFDPREFGLNMFQMEDSDANQTLTLLKVKQALEDASIEPFTKEKKNIGCVLGIGGGQKASHEFYSRLNYVVVEKVLRKMGLPDADVEEAVEKYKANFPEWRLDSFPGFLGNVTAGRCSNTFNMEGMNCVVDAACASSLIAIKVAVEELLFGDCDTMIAGATCTDNSLGMYMAFSKTPVFSTDPSVRAYDEKTKGMLIGEGSAMFVLKRYADAVRDGDTIHAVLRSCSSSSDGKAAGIYTPTISGQEEALRRAYARAGVCPSTIGLVEGHGTGTPVGDRIELTALRNLFDKAFGSKKEQIAVGSIKSQIGHLKSVAGFAGLVKAVLALKHKTLPGSINVDQPPLLYDGTQIQDSSLYINKTNRPWFTQNKLPRRAGVSSFGFGGANYHAVLEEFEPEHEKPYRLNTVGHPVLLYAPSVEALKVLCNDQLAELTIALEEAKTHKNVDKVCGYKFIDEFQLQGSCPPENPRVGFLATLPTSNIIVALKAILAQLDAKPDAKKWDLPHKKAFGATFASSSVKGSVAALFAGQGTQYLNMFSDVAMNWPPFRDSIVAMEEAQTEVFEGQVEPISKVLFPRERYASESEQGNELLCLTEYSQPTTIAAAVGAFDIFKAAGFKPDMVGGHSLGEFAALYAAGSISRDDLYKLVCKRAKAMANASDGAMAAVIGPDARLVTPQNSDVYVANFNSATQVVISGTVQGVKEESKLLISKGFRVLPLKCQGAFHSPLMGPSEDSFKSLVETCTISPPKNVKFFCNVSGKESPNPKQTLKSHMTSSVQFEEQIRNMYDAGARVFLEFGPRQVLAKLIAEMFPSCTAISVNPASSGDSDVQLRLAAVKFAVSGAALSTFDPWEYRKPQDLLIRKPRKTALVLSAATYVSPKTLAERKKAMEDIKLVSITPRDSMVSIGKIAQEVRTAKQPLETEIRRLNKELEHLKRELAAAKASVKSASKSSKERSVLSKHRALLQNILQDYDDLRVVPFAVRSVAVDNTAPYADQVSTPASERSASPLFEKRSSVSSARLAEAEAAVLSVLADKTGYDSSMIEMDMDLESELGVDSIKRVEIMSEVQTLLSVEVSDVDALSRTKTVGDVIEAMKLELGGPQGQTLTAESIRQPPVSEPAVPTSSSSSIANVSSARLAEAEAAVLSVLADKTGYDSSMIEMDMDLESELGVDSIKRVEIMSEVQTLLSVEVSDVDALSRTKTVGDVIEAMKLELGGPQGQTLTAESIRQPPVSEPAVPTSSSSSIANVSSARLAEAEAAVLSVLADKTGYDSSMIEMDMDLESELGVDSIKRVEIMSEVQTLLSVEVSDVDALSRTKTVGDVIEAMKLELGGPQGQTLTAESIRQPPVSEPAVPTSSSSSIANVLSARLAEAEAAVLSVLADKTGYDSSMIEMDMDLESELGVDSIKRVEIMSEVQTLLSVEVSDVDALSRTKTVGDVIEAMKLELGGPQGQTLTAESIRQPPVSEPAVPTSSSSSIANVSSARLAEAEAAVLSVLADKTGYDSSMIEMDMDLESELGVDSIKRVEIMSEVQTLLSVEVSDVDALSRTKTVGDVIEAMKLELGGPQGQTLTSEPIHQPPVSEPAVPTSSSSSIANVSSARLAEAEAAVLSVLADKTGYDSSMIEMDMDLESELGVDSIKRVEIMSEVQTLLSVEVSDVDALSRTKTVGDVIEAMKMELGGPQGQTLTAESIRQPPVSEPAVPTSSSSSIANVSSARLAEAEAAVLSVLADKTGYDSSMIEMDMDLESELGVDSIKRVEIMSEVQALLSVEVSDVDALSRTKTVGDVIEAMKMELGGPQGQTLTAESIREPPVSEPAVPTSSSSSIANVSSARLAEAEAAVLSVLADKTGYDSSMIEMDMDLESELGVDSIKRVEIMSEVQTLLSVEVSDVDALSRTKTVGDVIEAMKLELGESSSIETLNCTEVEHTSYKSVKASGCENVDTRFAKVVQISLPSKLKSTVSHDRPVIVVDDGTPLTTELCKILGGNIVVLSYQGKPAGPRGVEVPDLSEEALIQALALIRSTYGVPIGFICQQVSNVSTKAQLCWALLAAKHLKKDLNAVLPDSRSFFVGVVRLNGKLGTFENISDFSKFDLTKALDYGQRGSLLGLCKSLDLEWEQVFCRGIDLACDLMPLQAARILRNELQCPNMRLREVGYDISGARYTISTDDLLCGPSKAKVEAADLFLVTGGARGITPHCVREIASRSPGTTFVLVGRSEMSDEPDWAVGHYNKDLDQSTMKHLKATHAAGGVKPTPKAHRALVNRVTGSREVRESLRAIQEAGANVEYIACDVSDENKVRQLVQRVEQKYGCEITGIWHASGVLRDKLVEQKTTDDFEAVFGTKVTGLVNIVSQVNMSKLRHFILFSSLAGFHGNKGQTDYAIANEALNKIAHTLSAFLPKLNAKVLDFGPWVGSGMVTETLEKHFKAMGVQTIPLEPGARTVAQIILASSPPQSLLGNWGFPATKPLQRSNVVTGTLSPEEIEFIADHKIQGRKVLPMMAAIGFMASIAEGLYPGYNLQGVENAQLFQGLTINQETKFQITLIEEHNSEENLDVLTSLGVMLESGKVLPAYRCVVCLNTTQQQPKLSPKILNLEVDPACEVNPYDGKSLFHGPLLQFVQQVLHSSTKGLVAKCRALPIKEAIRGPFIKQTLHDPILDDVIFQLMLVWCRNALGSASLPNRIEKMSYFGNVSEGSTFFASVTPVGPRVPKDPVIKMQFLLQDESGNTFSSGEGSVVLSDELVF

SEQ ID NO: 40 - DNA, 1500 bp, Thraustochytrium sp.
  CDS (1)..(1500)
atgaaggacatggaagatagacgggtcgctattgtgggcatgtcagctcacttgccttgtgggacagatgtgaaggaatcatggcaggctattcgcgatggaatcgactgtctaagtgacctacccgcggatcgtctcgacgttacagcttactacaatcccaacaaagccacgaaagacaagatctactgcaaacggggtggcttcatcccgaactatgacttcgacccccgcgaatttgggctcaacatgtttcaaatggaagactctgatgcgaatcagacacttaccttgctcaaagtcaaacaagctctcgaagatgcaagcatagagcctttcaccaaggagaagaagaacattggatgtgttttaggtattggtgggggccaaaaggcgagtcatgagttctactctcgtctcaactacgttgtcgttgaaaaggtacttcggaaaatgggtttaccagatgctgatgttgaagaagctgtggagaaatacaaggcaaattttcccgagtggcgcctagactctttccctgggtttcttgggaatgtaacggctggtcggtgcagtaacaccttcaacatggaaggtatgaactgcgttgtggatgctgcatgtgccagttctctaattgcaatcaaggttgcagttgaagagctactctttggtgactgtgacaccatgattgcaggtgccacctgcacggacaattcacttggcatgtacatggccttctctaaaacgccagttttttctactgacccaagtgtccgcgcgtatgatgagaaaacaaaagggatgctaattggagaaggttcagcaatgttcgttcttaaacgctatgcggatgccgtacgtgatggcgacacaattcacgcggttctgcgttcttgctcttcgtctagtgatggaaaagcggcaggaatttatactcctactatatctggacaagaagaagctttgcgtcgagcgtatgcccgtgcgggggtatgtccatctacgatcgggcttgttgagggtcacgggacagggacccctgttggagatcgcattgagttaacagctctgcggaacttgtttgacaaagcttttggtagcaagaaggaacaaatagcagttggcagcataaagtctcagataggtcacctgaaatctgttgccggctttgccggcttggtcaaagctgtgcttgcgcttaaacacaaaacgctcccaggttcgattaatgtcgaccagccacctttgttgtatgacggtactcaaattcaagactcttctttatatatcaacaagacaaatagaccatggtttacgcaaaacaagcttccgcgtcgggctggtgtctcaagttttggatttggaggtgcaaactaccacgcggttctggaagaattcgagcccgagcatgaaaaaccataccgcctcaatactgttggacatcctgtcctcttgtacgctccgtctgtggaagccctcaaagtactttgcaacgaccag

SEQ ID NO: 41 - protein, 500 aa, Thraustochytrium sp.
MKDMEDRRVAIVGMSAHLPCGTDVKESWQAIRDGIDCLSDLPADRLDVTAYYNPNKATKDKIYCKRGGFIPNYDFDPREFGLNMFQMEDSDANQTLTLLKVKQALEDASIEPFTKEKKNIGCVLGIGGGQKASHEFYSRLNYVVVEKVLRKMGLPDADVEEAVEKYKANFPEWRLDSFPGFLGNVTAGRCSNTFNMEGMNCVVDAACASSLIAIKVAVEELLFGDCDTMIAGATCTDNSLGMYMAFSKTPVFSTDPSVRAYDEKTKGMLIGEGSAMFVLKRYADAVRDGDTIHAVLRSCSSSSDGKAAGIYTPTISGQEEALRRAYARAGVCPSTIGLVEGHGTGTPVGDRIELTALRNLFDKAFGSKKEQIAVGSIKSQIGHLKSVAGFAGLVKAVLALKHKTLPGSINVDQPPLLYDGTQIQDSSLYINKTNRPWFTQNKLPRRAGVSSFGFGGANYHAVLEEFEPEHEKPYRLNTVGHPVLLYAPSVEALKVLCNDQ

SEQ ID NO: 42 - DNA, 1500 bp, Thraustochytrium sp.
  CDS (1)..(1500)
cttgcggagctcacaattgcattggaagaggcaaaaacacataaaaatgttgacaaagtttgtggctacaagtttattgacgaatttcagctccaaggaagctgtcctccagaaaatccgagagtaggatttttagcaacactgcctacttcaaatatcattgtcgcgcttaaggcaattctcgcgcagcttgatgcaaaaccagatgcgaagaaatgggatttgcctcataaaaaggcttttggggctaccttcgcatcgtcttcagtgaaaggctctgttgctgcgctcttcgcaggacagggtacccagtacttaaacatgttctctgatgtggcaatgaactggccaccgttccgtgacagcattgtcgcaatggaagaagctcaaactgaggtatttgagggccaagttgaaccaattagcaaagttctgtttccacgagagcgctatgcatccgaaagtgaacaggggaatgaacttctttgcttaacagagtactctcagccaactacgatagcagccgcagtaggggccttcgatattttcaaagcggctggctttaagccagacatggttggagggcattcacttggcgaatttgctgctttgtacgcggctgggtccatttcgcgtgacgacctgtacaagcttgtgtgcaaacgggcaaaggcaatggcgaacgctagtgacggagctatggcagcagtgattggcccagatgcacgtctagttacgccacaaaatagtgacgtttatgtcgcaaacttcaactccgcaactcaagtagtcatcagtggcactgttcaaggtgtgaaagaagagtcgaaattgctcatttcaaaggggttccgcgtactgccacttaaatgccagggcgccttccattctcctttgatggggccttctgaggatagtttcaaatcacttgtggagacttgtaccatctcgccgccaaaaaatgtgaaattcttttgcaatgttagtggcaaggaaagcccaaacccaaaacagaccctcaagtcacacatgacgtctagcgttcagttcgaggagcagattcgtaacatgtacgatgccggagcacgtgtttttctggagtttggaccccgccaagtccttgcaaagcttatcgcggaaatgtttccctcgtgtacagctatcagcgttaaccccgcgagcagtggtgacagtgacgtgcaactccgcctcgccgccgtaaaattcgcggtctcgggtgcagcccttagcacctttgatccatgggagtatcgcaagccacaagatcttcttattcgaaaaccacgaaaaactgcccttgttctatcagcagcaacatatgtttccccaaagactcttgcagaacgtaaaaaggctatggaagatatcaagctagtatccattacaccaagagatagtatggtatcaattggaaaaatcgcgcaagaagtacggacagctaaacagcctttagaaaccgaaattcgaagactcaacaaa

SEQ ID NO: 43 - protein, 500 aa, Thraustochytrium sp.
LAELTIALEEAKTHKNVDKVCGYKFIDEFQLQGSCPPENPRVGFLATLPTSNIIVALKAILAQLDAKPDAKKWDLPHKKAFGATFASSSVKGSVAALFAGQGTQYLNMFSDVAMNWPPFRDSIVAMEEAQTEVFEGQVEPISKVLFPRERYASESEQGNELLCLTEYSQPTTIAAAVGAFDIFKAAGFKPDMVGGHSLGEFAALYAAGSISRDDLYKLVCKRAKAMANASDGAMAAVIGPDARLVTPQNSDVYVANFNSATQVVISGTVQGVKEESKLLISKGFRVLPLKCQGAFHSPLMGPSEDSFKSLVETCTISPPKNVKFFCNVSGKESPNPKQTLKSHMTSSVQFEEQIRNMYDAGARVFLEFGPRQVLAKLIAEMFPSCTAISVNPASSGDSDVQLRLAAVKFAVSGAALSTFDPWEYRKPQDLLIRKPRKTALVLSAATYVSPKTLAERKKAMEDIKLVSITPRDSMVSIGKIAQEVRTAKQPLETEIRRLNK

SEQ ID NO: 44 - DNA, 351 bp, Thraustochytrium sp.
  CDS (1)..(351)
tcgaccccagcgtcagagcggtcggcttcaccgcttttcgagaaacgcagttcggtttcgtcagcacgcctcgctgaagctgaagccgcggtactgagcgttctcgcagacaagacaggctacgacagctcaatgatcgagatggacatggacctggagagtgagcttggcgttgatagcatcaaacgcgtggagatcatgagcgaggttcaaacgctgctcagcgtggaagtctccgacgttgacgctctgtcaagaaccaagactgttggcgacgtcatcgaggcgatgaagctggaactcggtggaccccaaggccagactttgaccgcggaatcgatccgtcagcca

SEQ ID NO: 45 - protein, 117 aa, Thraustochytrium sp.
STPASERSASPLFEKRSSVSSARLAEAEAAVLSVLADKTGYDSSMIEMDMDLESELGVDSIKRVEIMSEVQTLLSVEVSDVDALSRTKTVGDVIEAMKLELGGPQGQTLTAESIRQP

SEQ ID NO: 46 - protein, 5 aa, Thraustochytrium sp.
  MISC_FEATURE (1)..(5): Xaa = any amino acid
LGXDS

SEQ ID NO: 47 - DNA, 2790 bp, Thraustochytrium sp.
  CDS (1)..(2790)
tcgaccccagcgtcagagcggtcggcttcaccgcttttcgagaaacgcagttcggtttcgtcagcacgcctcgctgaagctgaagccgcggtactgagcgttctcgcagacaagacaggctacgacagctcaatgatcgagatggacatggacctggagagtgagcttggcgttgatagcatcaaacgcgtggagatcatgagcgaggttcaaacgctgctcagcgtggaagtctccgacgttgacgctctgtcaagaaccaagactgttggcgacgtcatcgaggcgatgaagctggaactcggtggaccccaaggccagactttgaccgcggaatcgatccgtcagccaccggtgtccgagcctgctgtaccgacctcatcgtcaagcagtattgctaatgtttcgtcagcacgcctcgctgaagctgaagctgcggtactgagcgttctcgcagacaagacaggctacgacagctcaatgatcgagatggacatggacctggagagcgagcttggcgttgatagcatcaaacgcgtggagatcatgagcgaggttcaaacgctgctcagcgtggaagtctccgacgttgacgctctgtcaagaactaagactgttggcgacgtcatcgaggcgatgaagctggaactcggtggaccccaaggccagactttgaccgcggaatcgatccgtcagccaccggtgtctgagcctgctgtaccgacctcatcgtcaagcagtattgctaatgtttcgtcagcacgcctcgctgaagctgaagcggcggtactgagcgttctcgcagacaagacaggctacgacagctcaatgatcgagatggacatggacctggagagcgagcttggcgtcgacagcatcaaacgcgtggagatcatgagcgaggttcaaacgctgctcagcgtggaagtctccgacgttgacgctctgtcaagaaccaagactgttggcgacgtcatcgaggcgatgaagctggaactcggtggaccccaaggccagactttgaccgcggaatcgatccgtcagccaccggtgtccgagcctgctgtaccgacctcatcgtcaagcagtattgctaatgttttgtcagcacgcctcgctgaagctgaagccgcggtactgagcgttctcgcagacaagacaggctacgacagctcaatgatcgagatggacatggacctggagagcgagcttggcgttgatagcatcaaacgcgtggagatcatgagcgaggttcaaacgttgctcagcgtggaagtctccgacgttgacgctctgtcaagaaccaagactgttggcgacgtcatcgaggcgatgaagctggaactcggtggaccccaaggccagactttgaccgcggaatcgatccgtcagccaccggtgtctgagcctgctgtaccgacctcatcgtcaagcagtattgctaatgtttcgtcagcacgcctcgctgaagctgaagccgcggtactgagcgttctcgcagacaagacaggctacgacagctcaatgatcgagatggacatggacctggagagtgagcttggcgtcgacagcatcaaacgcgtggagatcatgagcgaggttcaaacgctgctcagcgtggaagtctccgacgttgacgctctgtcaagaaccaagactgttggcgacgtcatcgaggcgatgaagctggaactcggtggaccccaaggccagactttgacctctgaaccgatccatcagccaccagtgtccgagcctgctgtaccgacctcatcgtcaagcagtattgctaatgtttcttcagcacgcctcgctgaagctgaagccgcggtactgagcgttctcgcagacaagacaggctacgacagctcaatgatcgagatggacatggacctggagagcgagcttggcgttgatagcatcaaacgcgtggaaatcatgagcgaggttcaaacgctgctcagcgtggaagtctccgacgttgacgctctgtcaagaaccaagactgttggcgacgtcatcgaggcgatgaagatggaactcggtggaccccaaggccagactttgaccgcggaatcgatccgtcagccaccggtgtctgagcctgctgtaccgacctcatcgtcaagcagtattgctaatgtttcgtcagcacgcctcgctgaagctgaagcggcggtactgagcgttctcgcagacaagacaggctacgacagctcaatgatcgagatggacatggacctggagagcgagcttggcgttgatagcatcaaacgcgtggagatcatgagcgaggttcaagcgctgctcagcgtggaagtctccgacgttgacgctctgtcaagaaccaagactgttggcgacgtcatcgaggcgatgaagatggaactcggtggaccccaaggccagactttgaccgcagaatcgatccgtgagccaccggtgtctgagcctgctgtaccgacctcatcgtcaagtagtatcgctaatgtttcttcagctcgcctcgctgaagctgaagccgcggtactgagcgttctcgcagacaagacaggctacgacagctcaatgatcgagatggacatggacctggagagtgagcttggcgtcgacagcatcaaacgcgtggagatcatgagcgaggttcaaacgttgctcagcgtggaagtctccgacgttgacgctctgtcaagaaccaagactgttggcgacgtcatcgaggcgatgaagctggaacttggggaatcatcaagtattgagactctcaattgtaccgaggttgagcacacg

SEQ ID NO: 48 - protein, 930 aa, Thraustochytrium sp.
STPASERSASPLFEKRSSVSSARLAEAEAAVLSVLADKTGYDSSMIEMDMDLESELGVDSIKRVEIMSEVQTLLSVEVSDVDALSRTKTVGDVIEAMKLELGGPQGQTLTAESIRQPPVSEPAVPTSSSSSIANVSSARLAEAEAAVLSVLADKTGYDSSMIEMDMDLESELGVDSIKRVEIMSEVQTLLSVEVSDVDALSRTKTVGDVIEAMKLELGGPQGQTLTAESIRQPPVSEPAVPTSSSSSIANVSSARLAEAEAAVLSVLADKTGYDSSMIEMDMDLESELGVDSIKRVEIMSEVQTLLSVEVSDVDALSRTKTVGDVIEAMKLELGGPQGQTLTAESIRQPPVSEPAVPTSSSSSIANVLSARLAEAEAAVLSVLADKTGYDSSMIEMDMDLESELGVDSIKRVEIMSEVQTLLSVEVSDVDALSRTKTVGDVIEAMKLELGGPQGQTLTAESIRQPPVSEPAVPTSSSSSIANVSSARLAEAEAAVLSVLADKTGYDSSMIEMDMDLESELGVDSIKRVEIMSEVQTLLSVEVSDVDALSRTKTVGDVIEAMKLELGGPQGQTLTSEPIHQPPVSEPAVPTSSSSSIANVSSARLAEAEAAVLSVLADKTGYDSSMIEMDMDLESELGVDSIKRVEIMSEVQTLLSVEVSDVDALSRTKTVGDVIEAMKMELGGPQGQTLTAESIRQPPVSEPAVPTSSSSSIANVSSARLAEAEAAVLSVLADKTGYDSSMIEMDMDLESELGVDSIKRVEIMSEVQALLSVEVSDVDALSRTKTVGDVIEAMKMELGGPQGQTLTAESIREPPVSEPAVPTSSSSSIANVSSARLAEAEAAVLSVLADKTGYDSSMIEMDMDLESELGVDSIKRVEIMSEVQTLLSVEVSDVDALSRTKTVGDVIEAMKLELGESSSIETLNCTEVEHT

SEQ ID NO: 49 - DNA, 2433 bp, Thraustochytrium sp.
  CDS (1)..(2433)
aaaagtgtcaaggcttcagggtgtgagaatgtagatacccgtttcgctaaggttgtacaaatctcgcttcctagcaagctgaaatccactgtgtcgcacgatcgacctgtaattgttgtagatgatggaacgcccttaaccacggagctttgtaaaattcttgggggtaatattgtggttctctcttatcaagggaagcccgctggtccacggggagtcgaggtgccagatctttccgaggaagccctaattcaagctcttgcattgattcggtctacatatggagttccaattggttttatttgtcagcaagtgtctaatgtgagcaccaaggcacagctttgttgggcactcctcgcagcgaagcatctcaagaaggatttgaatgctgtcttacccgattcaagatccttcttcgtcggagttgtacgcttgaacgggaaacttggaactttcgaaaacatcagcgacttctctaaatttgatttgacgaaagccctagattacggacagcgtggttctctcttaggcctgtgcaagtcactagacttagaatgggaacaggtgttttgccgtggaatagatcttgcgtgtgatcttatgccactccaggccgcaaggatactcagaaatgagcttcagtgtcccaatatgcgccttcgcgaggttgggtacgatatttctggcgccaggtacaccatttcaaccgatgacctgctatgtggaccctcgaaggctaaagtagaggccgcagacttgtttcttgtgacaggtggcgcacgaggtattacacctcattgtgttcgtgagattgcaagtcgatcccccggaaccacatttgtgctggttggaagaagcgaaatgtccgacgagcctgactgggctgttggccactacaataaagacctggaccaaagcacaatgaaacacttgaaagcaacgcatgctgctggaggggtaaaacctacgcctaaagcacatcgtgcacttgtgaacagggtcactggctcacgggaggtacgagaatctcttagagcaatccaggaggcaggggcaaatgtcgaatatatcgcctgtgatgtttcggatgaaaacaaggtccgccaacttgtgcaaagagtggagcaaaagtatggctgtgaaataactgggatttggcatgcaagcggggttcttcgtgacaaacttgtcgagcaaaagactacagacgactttgaggcagtttttgggaccaaggtgactggccttgtaaacatcgtgtcacaagtcaatatgtctaagctacgacacttcatcctcttcagttctttggctggatttcatgggaacaagggccaaacggattatgcaattgctaatgaagccttgaacaaaatcgcgcatactctctcagcgtttttgcccaaactgaatgcaaaggtgctagacttcggtccgtgggtaggttcaggaatggtaaccgaaacacttgagaagcattttaaagctatgggggttcagactattcctctcgagccaggagcacggactgttgcgcaaatcattttggcaagttcgccaccgcaatcgcttttggggaactggggctttccagccaccaaaccgctacaacgctctaatgtagtcacgggcacactctctccggaagagatagaattcatcgcagaccacaaaattcaaggccgcaaggtgcttcccatgatggctgcaatcgggttcatggcctctattgcggaaggactctacccggggtacaatctgcaaggcgtggaaaatgctcagctctttcaaggcttgactatcaaccaagagacaaaatttcaaatcactctcattgaggagcacaactctgaggaaaacctggatgtcctgacatcccttggtgtaatgttggaaagcgggaaggtgcttcccgcttaccgatgtgttgtatgcttgaatacaacccagcagcagcccaagctatctccaaaaattcttaacttggaagttgaccctgcatgcgaggttaacccctatgatggaaagtcgttgttccacggtccgcttttgcaattcgttcaacaagtgttgcactcaagtaccaaaggcctcgttgccaagtgccgcgcgcttccaatcaaagaagccatccgagggccatttatcaagcaaacactccatgatccaattctagacgacgtcatttttcagctaatgctcgtgtggtgtcgtaatgctctaggaagtgcatcgctacccaacagaattgaaaagatgtcatactttgggaatgtctcagaaggtagcactttctttgcctcagttacacctgtgggaccaagagtaccaaaggatcccgtgatcaaaatgcagtttcttctccaagatgaatccggcaacacattttcatcgggggagggctcggttgtgcttagtgacgaactcgtcttt

SEQ ID NO: 50 - protein, 811 aa, Thraustochytrium sp.
KSVKASGCENVDTRFAKVVQISLPSKLKSTVSHDRPVIVVDDGTPLTTELCKILGGNIVVLSYQGKPAGPRGVEVPDLSEEALIQALALIRSTYGVPIGFICQQVSNVSTKAQLCWALLAAKHLKKDLNAVLPDSRSFFVGVVRLNGKLGTFENISDFSKFDLTKALDYGQRGSLLGLCKSLDLEWEQVFCRGIDLACDLMPLQAARILRNELQCPNMRLREVGYDISGARYTISTDDLLCGPSKAKVEAADLFLVTGGARGITPHCVREIASRSPGTTFVLVGRSEMSDEPDWAVGHYNKDLDQSTMKHLKATHAAGGVKPTPKAHRALVNRVTGSREVRESLRAIQEAGANVEYIACDVSDENKVRQLVQRVEQKYGCEITGIWHASGVLRDKLVEQKTTDDFEAVFGTKVTGLVNIVSQVNMSKLRHFILFSSLAGFHGNKGQTDYAIANEALNKIAHTLSAFLPKLNAKVLDFGPWVGSGMVTETLEKHFKAMGVQTIPLEPGARTVAQIILASSPPQSLLGNWGFPATKPLQRSNVVTGTLSPEEIEFIADHKIQGRKVLPMMAAIGFMASIAEGLYPGYNLQGVENAQLFQGLTINQETKFQITLIEEHNSEENLDVLTSLGVMLESGKVLPAYRCVVCLNTTQQQPKLSPKILNLEVDPACEVNPYDGKSLFHGPLLQFVQQVLHSSTKGLVAKCRALPIKEAIRGPFIKQTLHDPILDDVIFQLMLVWCRNALGSASLPNRIEKMSYFGNVSEGSTFFASVTPVGPRVPKDPVIKMQFLLQDESGNTFSSGEGSVVLSDELVF

SEQ ID NO: 51 - DNA, 5808 bp, Thraustochytrium sp.
  CDS (1)..(5805)
  misc_feature (1)..(5808): n = a c t or g
atgcaacttcctccagcgcattctgccgatgagaatcgcatcgcggtcgtgggcatggccgtcaaatatgcgggctgtgacaataaagaagagttttggaagactttgatgaatggtagtatcaataccaagtcgatttcggcagcaaggttgggcagcaataagcgtgacgaacactatgttcctgaacgatcgaaatatgcagatacgttctgtaacgaaaggtacggttgtatccagcaaggtacggataatgagcatgacctcctcctaggtcttgctcaagaagctctcgctgacgctgccgggcggatggagaaacaaccttcggaggcgttcgatctggaaaatactggcatcgtgagtgggtgcttatcttttccaatggataacctgcaaggagagttgttgaacttgtatcaaagccatgtggagaaacaacttccacctagtgccttggtagaagccgtgaagctttggtctgagcgacagaaatctacgaaagcacatgcaggggacaagcgccggttcattgacccagcttcttttgtagctgataaactgaacctaggcccactacattatgcgatcgatgcagcatgcgcttctgcattgtacgtgttaaaattagctcaagaccaccttgtttcaggtgccgttgatatgatgttatgtggagcgacgtgcttcccagaaccattcttcatcttgtctgggttctcgacttttcaagcgatgcctgntggggcagatggagtctcactacctctccataaaacgagtgctgggctcactccaggtgaaggggggtccattatggtgctcaagcgactgaaagacgctatcagagatggaaatcacatttatggtgtgctccttgaagcaaatttaagtaacgcaggttgtgggcttccactcagcccgcacttaccgagcgaagaatcatgtattcgtgatacctaccgccgtgctggagttgctgcagatcaaagtattcagtatattgagtgccacgctacgggaacccctcgaggggatgtcgtggaaattgaggcggttgaaagagttttcaagaaaaacgttccacgcttaggctcgacgaaaggaaattttggtcactcgttagttgcggctggtttcgcaggtatggcaaagcttcttcttgcaatggaacatggagtgattcctcccacaccaggtcttgatgcttcgaaccaggcaagtgagcacgttgtgacaaaggctatcacttggcctgagacacatggggctccaaaacgagctggcctttcagcatttggatttggtgggactaatgcgcatgcactcttcgaagagtttaatgccgagggcataagttatcgccctggaaagcctccagtcgaatcgaatacccgtccttccgtcgtaataactgggatggactgtacctttgggagccttgaagggattgatgcgttcgagactgccctgtacgaggggcgtgacgcagctcgtgacttacccgccaaacgttggaggttcctaggtgaggacttggagtttctccgagccatcaggctcaaggaaaagcctaggggttgttttgtggagagtgttgacgttaactttagacggctgaaaacgcccttgacaccagaagatatgttgcggccccaacaactcttggcggtttctacgatggaccgagcaattatcgatgcaggtctaaagaagggccaacatgtagcagttcttgttggcctaggaactgacctggaactttaccgtcatcgagcaagagtcgcgcttaaagaggttttgcacccgagcttaaagtcagacactgcaattctccagaaaataatgcaatatgtgaatgatgcaggaacttcgacttcatacacatcttacattggaaacctcgttgccacgcgtatttcgtctcagtggggattcacagggccgtcctttactgtcacagaaggaaataattccgtgtacagatgtgcacaactagccaaagatatgcttcaggttaaccgagttgatgctgtcgtcatcgcaggcgttgatctcaacggaagcgccgaaagtttttttgtccgagcaaatcgtcaaaagatatccaagctaagtcatccatgtgcaagcttcgacagagatgcagatggatttttcgcaggtgagggctgtggtgccctagttttcaagaggttagaagactgtgctcctcaggaaaaaatttatgctagtatagactctatcgcaatagataaagagcctactagctcagctgtgaaagctgtctaccaaagtgattcgagtctctccgatattgagctgttagaaatcagtggagactccaaacggtttgcagcattcgaaggcgctgtggaaattcaatcaagtgtggaagcccagctaaaaggactttccaaagtccttgaacctgcaaaaggccaaggcgtagcggtgggaagtactcgagcaaccgttggggatatagggtatgctacaggagcggcaagcctgattaaaactgcactctgcttatataatcgctaccttccggcattagcaaactggagtggcccatgtgaacagtccgcctggggctcaaacatgttcgtttgccatgaaacacggccgtggatgaaaaaccagaatgaaaagagatgtgccctcatttctggaacagatccatctcatacatgcttttccctcgtactatcggatactgggtgttatgaagagcacaatcgaacgtgctttgatgtgcaagcgccacagctagttctgatacacggattcgatggaaaaactattgtgcggcgacttgaaggatatctccttgaacttgttgaagggcatgcaagcccttcagagtatttccacaaactgattggacaaagtctacttgagaactcgaaagaaagtaaactcacactttcgcttgtgtgcaatccgaaccagctccaaaaggagctcatgcttgctatcaaaggagtacaacgaagcatgttaacagggaaggattgggtcagtccatcaggaagttgttttgccccaaatccgttatcaagcgcaaaagtggcattcatgtacggagaaggccgaagcccgtactgtggtgtaggcttgggtctacatcgtttgtggcccggtctccatgaaaatgtgaacaataagacagtcgatttatggacggaaggagatggttggttatatcctcgaacgttgacacgagaagagcatacaaaagccatcgaatctttcaacgcaaatcaaattgaaatgtttcgcgctgggattttcatctcaatgtgtcagacagactatgtcatgaatgttctcggtgtccagcctaaggccggatttgggctgagcttgggagaaatttcaatgctctttgcgatgtcaaaggagaactgcaggcagtcacaggaaatgaccaatcgtttgcgcggttctccagtgtggtctaacgagcttgctatcaacttcaatgcaattcgcaagttatggaaaatcccccgaggagctcccttagaatccttttggcaaggatacttggttcacggcacaagagaagaagtagagcatgctattggtctttctgagccttatgtacgtctgcttattgtgaacgattcaaggagtgccttgattgctggaaaaccagacgcctgtcaggcagtaatcagtagactaaactccaagttcccttctctgccggtaaagcaaggaatgattggtcattgcccagaagttcgtgcgttcatcaaagatattgggtacatccatgaaacactccgaatttccaatgactattcggattgtcagcttttctcagcggtaaccaagggcgcacttgacagctccacaatggaaatcaaacactttgtgggagaggtctactcccggatcgcagactttcctcaaatcgtcaacacggtgcattcggctggttatgacgtatttcttgagcttggctgtgatgcttctagatctgcagcagttcaaaacattcttggtggtcaaggaaagttcttgtctacagctattgacaaaaaaggacactccgcctggtcacaagtacttcgggctaccgcatcattagctgcacatcgagtaccgggaatctcaattttggatttgtttcacccaaatttccgagaaatgtgctgtacaatggcaaccacacctaaagtggaagataagttcctgcgcacgattcaaatcaatggtcggtttgaaaaagaaatgattcacctagaagatacaacattaagttgcttacccgctccaagtgaagcaaatatcgcagctattcaatctcggtcaattcgatctgctgcggcgcgttctggacaatcccatgattgtgcatcccatagccatgaagaaaataaggattcatgccctgaaaagctgaagcttgattctgtgtccgtcgccataaatttcgacaatgatgaccgcattcagcttgggcacgcgggttttcgggagatgtacaatacaagatatagcttgtacacaggggcgatggcaaagggaattgcatctgcagatcttgtcattgccgctgggaaagagggcatcctagcttcctatggagctggaggactacctcttgctactgttcgaaagggaatagacaaaattcaacaagccttgccaagtggcccatatgctgtaaatcttattcactctccctttgacggcaacttggagcagggaaacgtcgatttgttcttggaaaagaacgtccgcgtggcggaatgttccgcgtttacaacgctaacagtgccagtagtacactatcgtgctgcagggcttgttcggcgccaagatggaagcattttgatcaagaaccgaatcattgctaaagtatctaggacagaactcgctgagatgttccttcgtccggcacctcaaatcatcctcgaaaaactggtagcagcagaaatcatttcatctgaccaagcgcgtatggcagccaaagttcccatggcggacgacatcgcagtcgaagccgactctggtgggcacacggataatcggcctatgcacgtcattttgcccctgataattcaactccgcaatactatacttgcagagtatggctgtgccacggcttttcgtacccgtataggcgctggaggaggcattggttgtccttcagcggccctcgcagcctttgatatgggtgcgagttttgtcgtgactggaagcataaatcaaatttgccgcgaggcagggacttgcgatactgttcgggagctacttgccaactcaagctactcggacgtgacgatggcgccagcagcagacatgtttgaccaaggtgtgaaactccaagtcttaaaacgaggaacgatgtttccaagcagagcaaataaactccggaagctctttgtgaactacgaatctctagaaacactcccgtcgaaagagttgaaatacctggaaaacatcatattcaagcaagcagtagaccaggtgtgggaggaaacaaagcgcttttactgtgaaaaactgaacaatccagataaaattgcaagggccatgaaagatcctaaattgaagatgtcgctttgctttcggtggtatctctccaagagctctgggtgggccaacgcaggaattaaatctcgtgcactcgactaccagatctggtgtggcccggcaatgggctcgttcaacaatttcgccagcggcacatccctcgattggaaagtgactggggttttccctggcgttgcggaagtaaacatggccattttagatggcgcgcgagaactagctgctaaacgaaattaa

SEQ ID NO: 52 - protein, 1935 aa, Thraustochytrium sp.
  misc_feature (248)..(248): The 'Xaa' at location 248 stands for Asp, Gly, Ala, or Val.
MQLPPAHSADENRIAVVGMAVKYAGCDNKEEFWKTLMNGSINTKSISAARLGSNKRDEHYVPERSKYADTFCNERYGCIQQGTDNEHDLLLGLAQEALADAAGRMEKQPSEAFDLENTGIVSGCLSFPMDNLQGELLNLYQSHVEKQLPPSALVEAVKLWSERQKSTKAHAGDKRRFIDPASFVADKLNLGPLHYAIDAACASALYVLKLAQDHLVSGAVDMMLCGATCFPEPFFILSGFSTFQAMPXGADGVSLPLHKTSAGLTPGEGGSIMVLKRLKDAIRDGNHIYGVLLEANLSNAGCGLPLSPHLPSEESCIRDTYRRAGVAADQSIQYIECHATGTPRGDVVEIEAVERVFKKNVPRLGSTKGNFGHSLVAAGFAGMAKLLLAMEHGVIPPTPGLDASNQASEHVVTKAITWPETHGAPKRAGLSAFGFGGTNAHALFEEFNAEGISYRPGKPPVESNTRPSVVITGMDCTFGSLEGIDAFETALYEGRDAARDLPAKRWRFLGEDLEFLRAIRLKEKPRGCFVESVDVNFRRLKTPLTPEDMLRPQQLLAVSTMDRAIIDAGLKKGQHVAVLVGLGTDLELYRHRARVALKEVLHPSLKSDTAILQKIMQYVNDAGTSTSYTSYIGNLVATRISSQWGFTGPSFTVTEGNNSVYRCAQLAKDMLQVNRVDAVVIAGVDLNGSAESFFVRANRQKISKLSHPCASFDRDADGFFAGEGCGALVFKRLEDCAPQEKIYASIDSIAIDKEPTSSAVKAVYQSDSSLSDIELLEISGDSKRFAAFEGAVEIQSSVEAQLKGLSKVLEPAKGQGVAVGSTRATVGDIGYATGAASLIKTALCLYNRYLPALANWSGPCEQSAWGSNMFVCHETRPWMKNQNEKRCALISGTDPSHTCFSLVLSDTGCYEEHNRTCFDVQAPQLVLIHGFDGKTIVRRLEGYLLELVEGHASPSEYFHKLIGQSLLENSKESKLTLSLVCNPNQLQKELMLAIKGVQRSMLTGKDWVSPSGSCFAPNPLSSAKVAFMYGEGRSPYCGVGLGLHRLWPGLHENVNNKTVDLWTEGDGWLYPRTLTREEHTKAIESFNANQIEMFRAGIFISMCQTDYVMNVLGVQPKAGFGLSLGEISMLFAMSKENCRQSQEMTNRLRGSPVWSNELAINFNAIRKLWKIPRGAPLESFWQGYLVHGTREEVEHAIGLSEPYVRLLIVNDSRSALIAGKPDACQAVISRLNSKFPSLPVKQGMIGHCPEVRAFIKDIGYIHETLRISNDYSDCQLFSAVTKGALDSSTMEIKHFVGEVYSRIADFPQIVNTVHSAGYDVFLELGCDASRSAAVQNILGGQGKFLSTAIDKKGHSAWSQVLRATASLAAHRVPGISILDLFHPNFREMCCTMATTPKVEDKFLRTIQINGRFEKEMIHLEDTTLSCLPAPSEANIAAIQSRSIRSAAARSGQSHDCASHSHEENKDSCPEKLKLDSVSVAINFDNDDRIQLGHAGFREMYNTRYSLYTGAMAKGIASADLVIAAGKEGILASYGAGGLPLATVRKGIDKIQQALPSGPYAVNLIHSPFDGNLEQGNVDLFLEKNVRVAECSAFTTLTVPVVHYRAAGLVRRQDGSILIKNRIIAKVSRTELAEMFLRPAPQIILEKLVAAEIISSDQARMAAKVPMADDIAVEADSGGHTDNRPMHVILPLIIQLRNTILAEYGCATAFRTRIGAGGGIGCPSAALAAFDMGASFVVTGSINQICREAGTCDTVRELLANSSYSDVTMAPAADMFDQGVKLQVLKRGTMFPSRANKLRKLFVNYESLETLPSKELKYLENIIFKQAVDQVWEETKRFYCEKLNNPDKIARAMKDPKLKMSLCFRWYLSKSSGWANAGIKSRALDYQIWCGPAMGSFNNFASGTSLDWKVTGVFPGVAEVNMAILDGARELAAKRN

SEQ ID NO: 53 - DNA, 1500 bp, Thraustochytrium sp.
  CDS (1)..(1500)
  misc_feature (1)..(1500): n = a c t or g
atgcaacttcctccagcgcattctgccgatgagaatcgcatcgcggtcgtgggcatggccgtcaaatatgcgggctgtgacaataaagaagagttttggaagactttgatgaatggtagtatcaataccaagtcgatttcggcagcaaggttgggcagcaataagcgtgacgaacactatgttcctgaacgatcgaaatatgcagatacgttctgtaacgaaaggtacggttgtatccagcaaggtacggataatgagcatgacctcctcctaggtcttgctcaagaagctctcgctgacgctgccgggcggatggagaaacaaccttcggaggcgttcgatctggaaaatactggcatcgtgagtgggtgcttatcttttccaatggataacctgcaaggagagttgttgaacttgtatcaaagccatgtggagaaacaacttccacctagtgccttggtagaagccgtgaagctttggtctgagcgacagaaatctacgaaagcacatgcaggggacaagcgccggttcattgacccagcttcttttgtagctgataaactgaacctaggcccactacattatgcgatcgatgcagcatgcgcttctgcattgtacgtgttaaaattagctcaagaccaccttgtttcaggtgccgttgatatgatgttatgtggagcgacgtgcttcccagaaccattcttcatcttgtctgggttctcgacttttcaagcgatgcctgntggggcagatggagtctcactacctctccataaaacgagtgctgggctcactccaggtgaaggggggtccattatggtgctcaagcgactgaaagacgctatcagagatggaaatcacatttatggtgtgctccttgaagcaaatttaagtaacgcaggttgtgggcttccactcagcccgcacttaccgagcgaagaatcatgtattcgtgatacctaccgccgtgctggagttgctgcagatcaaagtattcagtatattgagtgccacgctacgggaacccctcgaggggatgtcgtggaaattgaggcggttgaaagagttttcaagaaaaacgttccacgcttaggctcgacgaaaggaaattttggtcactcgttagttgcggctggtttcgcaggtatggcaaagcttcttcttgcaatggaacatggagtgattcctcccacaccaggtcttgatgcttcgaaccaggcaagtgagcacgttgtgacaaaggctatcacttggcctgagacacatggggctccaaaacgagctggcctttcagcatttggatttggtgggactaatgcgcatgcactcttcgaagagtttaatgccgagggcataagttatcgccctggaaagcctccagtcgaatcgaatacccgtccttccgtcgtaataactgggatggactgtacctttgggagccttgaagggattgatgcgttcgagactgccctgtacgaggggcgtgacgcagctcgtgac

SEQ ID NO: 54 - protein, 500 aa, Thraustochytrium sp.
  misc_feature (248)..(248): The 'Xaa' at location 248 stands for Asp, Gly, Ala, or Val.
MQLPPAHSADENRIAVVGMAVKYAGCDNKEEFWKTLMNGSINTKSISAARLGSNKRDEHYVPERSKYADTFCNERYGCIQQGTDNEHDLLLGLAQEALADAAGRMEKQPSEAFDLENTGIVSGCLSFPMDNLQGELLNLYQSHVEKQLPPSALVEAVKLWSERQKSTKAHAGDKRRFIDPASFVADKLNLGPLHYAIDAACASALYVLKLAQDHLVSGAVDMMLCGATCFPEPFFILSGFSTFQAMPXGADGVSLPLHKTSAGLTPGEGGSIMVLKRLKDAIRDGNHIYGVLLEANLSNAGCGLPLSPHLPSEESCIRDTYRRAGVAADQSIQYIECHATGTPRGDVVEIEAVERVFKKNVPRLGSTKGNFGHSLVAAGFAGMAKLLLAMEHGVIPPTPGLDASNQASEHVVTKAITWPETHGAPKRAGLSAFGFGGTNAHALFEEFNAEGISYRPGKPPVESNTRPSVVITGMDCTFGSLEGIDAFETALYEGRDAARD

SEQ ID NO: 55 - DNA, 1500 bp, Thraustochytrium sp.
  CDS (1)..(1500)
ttacccgccaaacgttggaggttcctaggtgaggacttggagtttctccgagccatcaggctcaaggaaaagcctaggggttgttttgtggagagtgttgacgttaactttagacggctgaaaacgcccttgacaccagaagatatgttgcggccccaacaactcttggcggtttctacgatggaccgagcaattatcgatgcaggtctaaagaagggccaacatgtagcagttcttgttggcctaggaactgacctggaactttaccgtcatcgagcaagagtcgcgcttaaagaggttttgcacccgagcttaaagtcagacactgcaattctccagaaaataatgcaatatgtgaatgatgcaggaacttcgacttcatacacatcttacattggaaacctcgttgccacgcgtatttcgtctcagtggggattcacagggccgtcctttactgtcacagaaggaaataattccgtgtacagatgtgcacaactagccaaagatatgcttcaggttaaccgagttgatgctgtcgtcatcgcaggcgttgatctcaacggaagcgccgaaagtttttttgtccgagcaaatcgtcaaaagatatccaagctaagtcatccatgtgcaagcttcgacagagatgcagatggatttttcgcaggtgagggctgtggtgccctagttttcaagaggttagaagactgtgctcctcaggaaaaaatttatgctagtatagactctatcgcaatagataaagagcctactagctcagctgtgaaagctgtctaccaaagtgattcgagtctctccgatattgagctgttagaaatcagtggagactccaaacggtttgcagcattcgaaggcgctgtggaaattcaatcaagtgtggaagcccagctaaaaggactttccaaagtccttgaacctgcaaaaggccaaggcgtagcggtgggaagtactcgagcaaccgttggggatatagggtatgctacaggagcggcaagcctgattaaaactgcactctgcttatataatcgctaccttccggcattagcaaactggagtggcccatgtgaacagtccgcctggggctcaaacatgttcgtttgccatgaaacacggccgtggatgaaaaaccagaatgaaaagagatgtgccctcatttctggaacagatccatctcatacatgcttttccctcgtactatcggatactgggtgttatgaagagcacaatcgaacgtgctttgatgtgcaagcgccacagctagttctgatacacggattcgatggaaaaactattgtgcggcgacttgaaggatatctccttgaacttgttgaagggcatgcaagcccttcagagtatttccacaaactgattggacaaagtctacttgagaactcgaaagaaagtaaactcacactttcgcttgtgtgcaatccgaaccagctccaaaaggagctcatgcttgctatcaaaggagtacaacgaagc

SEQ ID NO: 56 - protein, 500 aa, Thraustochytrium sp.
LPAKRWRFLGEDLEFLRAIRLKEKPRGCFVESVDVNFRRLKTPLTPEDMLRPQQLLAVSTMDRAIIDAGLKKGQHVAVLVGLGTDLELYRHRARVALKEVLHPSLKSDTAILQKIMQYVNDAGTSTSYTSYIGNLVATRISSQWGFTGPSFTVTEGNNSVYRCAQLAKDMLQVNRVDAVVIAGVDLNGSAESFFVRANRQKISKLSHPCASFDRDADGFFAGEGCGALVFKRLEDCAPQEKIYASIDSIAIDKEPTSSAVKAVYQSDSSLSDIELLEISGDSKRFAAFEGAVEIQSSVEAQLKGLSKVLEPAKGQGVAVGSTRATVGDIGYATGAASLIKTALCLYNRYLPALANWSGPCEQSAWGSNMFVCHETRPWMKNQNEKRCALISGTDPSHTCFSLVLSDTGCYEEHNRTCFDVQAPQLVLIHGFDGKTIVRRLEGYLLELVEGHASPSEYFHKLIGQSLLENSKESKLTLSLVCNPNQLQKELMLAIKGVQRS

SEQ ID NO: 57 - DNA, 1500 bp, Thraustochytrium sp.
  CDS (1)..(1500)
atgttaacagggaaggattgggtcagtccatcaggaagttgttttgccccaaatccgttatcaagcgcaaaagtggcattcatgtacggagaaggccgaagcccgtactgtggtgtaggcttgggtctacatcgtttgtggcccggtctccatgaaaatgtgaacaataagacagtcgatttatggacggaaggagatggttggttatatcctcgaacgttgacacgagaagagcatacaaaagccatcgaatctttcaacgcaaatcaaattgaaatgtttcgcgctgggattttcatctcaatgtgtcagacagactatgtcatgaatgttctcggtgtccagcctaaggccggatttgggctgagcttgggagaaatttcaatgctctttgcgatgtcaaaggagaactgcaggcagtcacaggaaatgaccaatcgtttgcgcggttctccagtgtggtctaacgagcttgctatcaacttcaatgcaattcgcaagttatggaaaatcccccgaggagctcccttagaatccttttggcaaggatacttggttcacggcacaagagaagaagtagagcatgctattggtctttctgagccttatgtacgtctgcttattgtgaacgattcaaggagtgccttgattgctggaaaaccagacgcctgtcaggcagtaatcagtagactaaactccaagttcccttctctgccggtaaagcaaggaatgattggtcattgcccagaagttcgtgcgttcatcaaagatattgggtacatccatgaaacactccgaatttccaatgactattcggattgtcagcttttctcagcggtaaccaagggcgcacttgacagctccacaatggaaatcaaacactttgtgggagaggtctactcccggatcgcagactttcctcaaatcgtcaacacggtgcattcggctggttatgacgtatttcttgagcttggctgtgatgcttctagatctgcagcagttcaaaacattcttggtggtcaaggaaagttcttgtctacagctattgacaaaaaaggacactccgcctggtcacaagtacttcgggctaccgcatcattagctgcacatcgagtaccgggaatctcaattttggatttgtttcacccaaatttccgagaaatgtgctgtacaatggcaaccacacctaaagtggaagataagttcctgcgcacgattcaaatcaatggtcggtttgaaaaagaaatgattcacctagaagatacaacattaagttgcttacccgctccaagtgaagcaaatatcgcagctattcaatctcggtcaattcgatctgctgcggcgcgttctggacaatcccatgattgtgcatcccatagccatgaagaaaataaggattcatgccctgaaaagctgaagcttgattctgtgtccgtcgccataaatttcgacaatgatgaccgcattcagcttgggcacgcgggttttcgggagatgtac

SEQ ID NO: 58 - protein, 500 aa, Thraustochytrium sp.
MLTGKDWVSPSGSCFAPNPLSSAKVAFMYGEGRSPYCGVGLGLHRLWPGLHENVNNKTVDLWTEGDGWLYPRTLTREEHTKAIESFNANQIEMFRAGIFISMCQTDYVMNVLGVQPKAGFGLSLGEISMLFAMSKENCRQSQEMTNRLRGSPVWSNELAINFNAIRKLWKIPRGAPLESFWQGYLVHGTREEVEHAIGLSEPYVRLLIVNDSRSALIAGKPDACQAVISRLNSKFPSLPVKQGMIGHCPEVRAFIKDIGYIHETLRISNDYSDCQLFSAVTKGALDSSTMEIKHFVGEVYSRIADFPQIVNTVHSAGYDVFLELGCDASRSAAVQNILGGQGKFLSTAIDKKGHSAWSQVLRATASLAAHRVPGISILDLFHPNFREMCCTMATTPKVEDKFLRTIQINGRFEKEMIHLEDTTLSCLPAPSEANIAAIQSRSIRSAAARSGQSHDCASHSHEENKDSCPEKLKLDSVSVAINFDNDDRIQLGHAGFREMY

SEQ ID NO: 59 - DNA, 1305 bp, Thraustochytrium sp.
  CDS (1)..(1305)
aatacaagatatagcttgtacacaggggcgatggcaaagggaattgcatctgcagatcttgtcattgccgctgggaaagagggcatcctagcttcctatggagctggaggactacctcttgctactgttcgaaagggaatagacaaaattcaacaagccttgccaagtggcccatatgctgtaaatcttattcactctccctttgacggcaacttggagcagggaaacgtcgatttgttcttggaaaagaacgtccgcgtggcggaatgttccgcgtttacaacgctaacagtgccagtagtacactatcgtgctgcagggcttgttcggcgccaagatggaagcattttgatcaagaaccgaatcattgctaaagtatctaggacagaactcgctgagatgttccttcgtccggcacctcaaatcatcctcgaaaaactggtagcagcagaaatcatttcatctgaccaagcgcgtatggcagccaaagttcccatggcggacgacatcgcagtcgaagccgactctggtgggcacacggataatcggcctatgcacgtcattttgcccctgataattcaactccgcaatactatacttgcagagtatggctgtgccacggcttttcgtacccgtataggcgctggaggaggcattggttgtccttcagcggccctcgcagcctttgatatgggtgcgagttttgtcgtgactggaagcataaatcaaatttgccgcgaggcagggacttgcgatactgttcgggagctacttgccaactcaagctactcggacgtgacgatggcgccagcagcagacatgtttgaccaaggtgtgaaactccaagtcttaaaacgaggaacgatgtttccaagcagagcaaataaactccggaagctctttgtgaactacgaatctctagaaacactcccgtcgaaagagttgaaatacctggaaaacatcatattcaagcaagcagtagaccaggtgtgggaggaaacaaagcgcttttactgtgaaaaactgaacaatccagataaaattgcaagggccatgaaagatcctaaattgaagatgtcgctttgctttcggtggtatctctccaagagctctgggtgggccaacgcaggaattaaatctcgtgcactcgactaccagatctggtgtggcccggcaatgggctcgttcaacaatttcgccagcggcacatccctcgattggaaagtgactggggttttccctggcgttgcggaagtaaacatggccattttagatggcgcgcgagaactagctgctaaacgaaat

SEQ ID NO: 60 - protein, 435 aa, Thraustochytrium sp.
NTRYSLYTGAMAKGIASADLVIAAGKEGILASYGAGGLPLATVRKGIDKIQQALPSGPYAVNLIHSPFDGNLEQGNVDLFLEKNVRVAECSAFTTLTVPVVHYRAAGLVRRQDGSILIKNRIIAKVSRTELAEMFLRPAPQIILEKLVAAEIISSDQARMAAKVPMADDIAVEADSGGHTDNRPMHVILPLIIQLRNTILAEYGCATAFRTRIGAGGGIGCPSAALAAFDMGASFVVTGSINQICREAGTCDTVRELLANSSYSDVTMAPAADMFDQGVKLQVLKRGTMFPSRANKLRKLFVNYESLETLPSKELKYLENIIFKQAVDQVWEETKRFYCEKLNNPDKIARAMKDPKLKMSLCFRWYLSKSSGWANAGIKSRALDYQIWCGPAMGSFNNFASGTSLDWKVTGVFPGVAEVNMAILDGARELAAKRN

SEQ ID NO: 61 - DNA, 4410 bp, Thraustochytrium sp.
  CDS (1)..(4410)
atgggcccgcgagtggcgtcaggcaaggtgccggcttgggagatgagcaagtccgagctgtgtgatgaccgcacggtagtctttgactatgaggagctgctggagttcgctgagggcgatatcagtaaggtttttgggccggagttcaaagtggtggacgggtttaggcgcagggtgaggttgcccgctcgagagtacctgctggtgacccgggttacgctgatggatgccgaggtgggcaactttcgagtgggagcacgtatggtgacagagtatgacgtacctgtgaacggagagctctcggaagggggagatgtgccgtgggctgtgttggtggaagccgggcagtgcgacttgctgctaatttcttacatgggcatcgatttccagtgcaaaggagagcgggtctaccggctgctgaacaccaccttgacgttttttggcgtcgcgaaagaaggggaaacgcttgtgtacgatattcgcgtcacgggtttcgccaagaggccggacggagatatctccatgttctttttcgaatatgattgctactgcaatggcaagcttctcatcgaaatgcgagatggctctgcaggcttcttcacggacgaagagctcgctgccggcaaaggagtggtcgtcactcgtgcacagcaaaacatgcgggacaaaattgtacggcagtccattgagccttttgcactggcggcttgcacgcacaaaacgactctgaacgagagtgacatgcagtcccttgtggagcgaaactgggcaaacgtttttggcaccagtaacaagatggcggagctcaactataaaatttgcgccaggaaaatgctcatgatcgacagggttacccacattgaccaccacggtggggcgtatggcctcggactacttgttggagagaagatcttggatcgaaaccattggtactttccttgtcactttgtcaatgatcaagtcatggcagggtcactggtcagcgatggttgcagccagctcttaaaactctatatgatctggcttggcctccacctgaaaatggaggaatttgattttctcccagttagcggccacaaaaacaaggtgcgatgcaggggacaaatttcaccgcataaaggcaagcttgtctacgtcatggaaatcaaaaagatgggttacgatcaagcatctggaagcccatacgccatcgcggacgttgatatcattgacgtcaacgaagagctgggtcaaagttttgacatcaacgaccttgcgagctacggaaaaggtgacctgagcaaaaaaatcgtggttgacttcaaaggaattgctttgcagctcaaaggccgcgctttttcacgcatgagttccagctcgtccttgaacgaaggatggcaatgtgttccaaaaccaagccagagaatggaacacgaacagccccctgctcactgccttgcaagcgaccccgaagccccttcaactgtgacctggcacccaatgtcaaagcttcctggcaaccctacgccgttcttctccccttcatcttaccctccgagggcaatttgcttcatccctttcccgggcaatccccttgacaacaactgcaaggctggagaaatgcccctgaactggtacaacatgtcagagttcatgtgtggcaaggtttctaactgcttgggcccagaattcgcacgctttgacaagtcgaacaccagccggagccctgcttttgacttggctctggtgacccgagttgttgaagtcacaaacatggaacacggcaagtttctaaacgttgattgcaatccaagcaaaggcacaatggtgggggagtttgactgtccccaagacgcgtggttctttgatggttcgtgcaacgacggccatatgccgtattccattatcatggaaatcggactgcaaacctcaggtgttctcacctcggtgttgaaggcaccgctgactatggacaaggatgacattctctttcgaaacctcgatgcaagtgctgaaatggtgcgtccagacgtggatgttcgcggcaaaacgattcgaaacgtgaccaagtgtaccggctatgcaatgttgggaaagatggggattcaccggttcacgtttgagttgagcgttgacggcgtggtattttataaaggatccacttcctttggatggttcactcccgaggtgtttgctcagcaagctggactcgacaacgggaaaaagacggagccctggtgcaagactaacaacacctcggttcgaagagttgaaatcgcatccgccaaaggaaaagagcagctgactgagaagcttcccgacgcaactaatgctcaagttcttcggcgttcagagcagtgtgaatacctcgattacctcaatattgcccctgactctgggctgcatgggaagggctacgcccacggacacaaagacgttaacccgcaagactggttcttctcttgccacttttggttcgatcctgtaatgccaggatctttaggaattgaatcaatgttccagcttatcgaggcctttgcggtggaccaaaacattcctggagagtacaacgtatccaatccgacctttgcccatgcaccaggcaaaacggcgtggaaataccgaggccagctcacaccaaagaaccgtgcgatggactgcgaggtgcatatcgtttcaattaccgcctcccccgagaacgggggctacgttgacatcgtggccgatggagcgctttgggtagatggacttcgcgtgtacgaagccaaagagcttcgagttcgtgtcgtttcggcaaaacctcaagcaattccggatgtacaacaacagccacctagcgcaaaggcggacccggggaaaacaggagttgcactttcgcccactcagctacgcgacgtcctgcttgaagtggacaatccattgtatcttggtgtagagaactccaatttggtgcagtttgagtcgaaacctgcaacttcttcacgtatcgtttcgatcaaaccgtgctcgattagtgaccttggcgataagtcttttatggaaacgtacaacgtgtcagcacctctgtatactggagcaatggccaagggcattgcatccgccgacttggtcattgctgctgggaaacgcaagatacttggatcgtttggtgcgggagggctgcctatttccatagtccgtgaagcactggagaaaattcaacaacacctgccccacggcccctacgctgttaacctcattcactcgcctttcgacagcaacttggaaaagggcaacgttgacctctttctcgagatgggcgtgacagtggtagaatgcagcgcgttcatggaactcacggcccaggttgtccggtaccgcgcgtctggtctaagcaaaagtgcggacggttcgattcgcattgctcaccgtattattggcaaggtttccagaaccgagctggcagaaatgtttattcgtccagcaccacagcacctcctccaaaaactcgtagcctccggcgagctgacagctgagcaagccgagcttgcaacacaggttccggtggcggatgacattgcggtcgaagccgactcgggggggcataccgacaacaggcctattcacgtcattcttcctctaatcatcaacctacgcaaccgtttgcataaagagcttgactacccttcgcatctccgggtacgtgtgggtgctggtggtggtattggatgtcctcaagccgctcttgcagcatttcaaatgggggcagcgtttttaatcactggaacggtgaaccagcttgctcgtgaaagtggcacttgtgacaacgtccggttacagctctcaaaggccacgtatagcgacgtgtgtatggctcctgctgccgatatgtttgaccaaggcgtggagctgcaagtattgaagaaaggcacgctgttcccaagtcgtgctaagaagctgtacgagctgttctgcaagtatgactcgtttgaggcaatgccggctgaagaattgcaacgggttgaaaagcggatttttcaaaagtcgcttgctgaagtttggcaggagaccagtgacttttacattcatcgtatcaagaaccctgagaaaatcaatcgtgctgcaagcgatggcaaactgaaaatgtcgctttgctttcgctggtaccttgggctttcctcattttgggccaactctggggcacaagatcgcgtcatggactatcaaatttggtgtggccctgctattggcgctttcaatgattttaccaagggcacgtaccttgacgtgactgttgcaaagagttacccttgtgtggcacagatcaatttgcaaattttgcaaggagctgcgtatctgaaacgccttggtgtcattcgttttgaccgcatgctgctgcaggccgtcgatatcgacgatcctgtatttacttacgtgccgacccagccactt

SEQ ID NO: 62 - protein, 1470 aa, Thraustochytrium sp.
MGPRVASGKVPAWEMSKSELCDDRTVVFDYEELLEFAEGDISKVFGPEFKVVDGFRRRVRLPAREYLLVTRVTLMDAEVGNFRVGARMVTEYDVPVNGELSEGGDVPWAVLVEAGQCDLLLISYMGIDFQCKGERVYRLLNTTLTFFGVAKEGETLVYDIRVTGFAKRPDGDISMFFFEYDCYCNGKLLIEMRDGSAGFFTDEELAAGKGVVVTRAQQNMRDKIVRQSIEPFALAACTHKTTLNESDMQSLVERNWANVFGTSNKMAELNYKICARKMLMIDRVTHIDHHGGAYGLGLLVGEKILDRNHWYFPCHFVNDQVMAGSLVSDGCSQLLKLYMIWLGLHLKMEEFDFLPVSGHKNKVRCRGQISPHKGKLVYVMEIKKMGYDQASGSPYAIADVDIIDVNEELGQSFDINDLASYGKGDLSKKIVVDFKGIALQLKGRAFSRMSSSSSLNEGWQCVPKPSQRMEHEQPPAHCLASDPEAPSTVTWHPMSKLPGNPTPFFSPSSYPPRAICFIPFPGNPLDNNCKAGEMPLNWYNMSEFMCGKVSNCLGPEFARFDKSNTSRSPAFDLALVTRVVEVTNMEHGKFLNVDCNPSKGTMVGEFDCPQDAWFFDGSCNDGHMPYSIIMEIGLQTSGVLTSVLKAPLTMDKDDILFRNLDASAEMVRPDVDVRGKTIRNVTKCTGYAMLGKMGIHRFTFELSVDGVVFYKGSTSFGWFTPEVFAQQAGLDNGKKTEPWCKTNNTSVRRVEIASAKGKEQLTEKLPDATNAQVLRRSEQCEYLDYLNIAPDSGLHGKGYAHGHKDVNPQDWFFSCHFWFDPVMPGSLGIESMFQLIEAFAVDQNIPGEYNVSNPTFAHAPGKTAWKYRGQLTPKNRAMDCEVHIVSITASPENGGYVDIVADGALWVDGLRVYEAKELRVRVVSAKPQAIPDVQQQPPSAKADPGKTGVALSPTQLRDVLLEVDNPLYLGVENSNLVQFESKPATSSRIVSIKPCSISDLGDKSFMETYNVSAPLYTGAMAKGIASADLVIAAGKRKILGSFGAGGLPISIVREALEKIQQHLPHGPYAVNLIHSPFDSNLEKGNVDLFLEMGVTVVECSAFMELTAQVVRYRASGLSKSADGSIRIAHRIIGKVSRTELAEMFIRPAPQHLLQKLVASGELTAEQAELATQVPVADDIAVEADSGGHTDNRPIHVILPLIINLRNRLHKELDYPSHLRVRVGAGGGIGCPQAALAAFQMGAAFLITGTVNQLARESGTCDNVRLQLSKATYSDVCMAPAADMFDQGVELQVLKKGTLFPSRAKKLYELFCKYDSFEAMPAEELQRVEKRIFQKSLAEVWQETSDFYIHRIKNPEKINRAASDGKLKMSLCFRWYLGLSSFWANSGAQDRVMDYQIWCGPAIGAFNDFTKGTYLDVTVAKSYPCVAQINLQILQGAAYLKRLGVIRFDRMLLQAVDIDDPVFTYVPTQPL

SEQ ID NO: 63 - DNA, 1500 bp, Thraustochytrium sp.
  CDS (1)..(1500)
atgggcccgcgagtggcgtcaggcaaggtgccggcttgggagatgagcaagtccgagctgtgtgatgaccgcacggtagtctttgactatgaggagctgctggagttcgctgagggcgatatcagtaaggtttttgggccggagttcaaagtggtggacgggtttaggcgcagggtgaggttgcccgctcgagagtacctgctggtgacccgggttacgctgatggatgccgaggtgggcaactttcgagtgggagcacgtatggtgacagagtatgacgtacctgtgaacggagagctctcggaagggggagatgtgccgtgggctgtgttggtggaagccgggcagtgcgacttgctgctaatttcttacatgggcatcgatttccagtgcaaaggagagcgggtctaccggctgctgaacaccaccttgacgttttttggcgtcgcgaaagaaggggaaacgcttgtgtacgatattcgcgtcacgggtttcgccaagaggccggacggagatatctccatgttctttttcgaatatgattgctactgcaatggcaagcttctcatcgaaatgcgagatggctctgcaggcttcttcacggacgaagagctcgctgccggcaaaggagtggtcgtcactcgtgcacagcaaaacatgcgggacaaaattgtacggcagtccattgagccttttgcactggcggcttgcacgcacaaaacgactctgaacgagagtgacatgcagtcccttgtggagcgaaactgggcaaacgtttttggcaccagtaacaagatggcggagctcaactataaaatttgcgccaggaaaatgctcatgatcgacagggttacccacattgaccaccacggtggggcgtatggcctcggactacttgttggagagaagatcttggatcgaaaccattggtactttccttgtcactttgtcaatgatcaagtcatggcagggtcactggtcagcgatggttgcagccagctcttaaaactctatatgatctggcttggcctccacctgaaaatggaggaatttgattttctcccagttagcggccacaaaaacaaggtgcgatgcaggggacaaatttcaccgcataaaggcaagcttgtctacgtcatggaaatcaaaaagatgggttacgatcaagcatctggaagcccatacgccatcgcggacgttgatatcattgacgtcaacgaagagctgggtcaaagttttgacatcaacgaccttgcgagctacggaaaaggtgacctgagcaaaaaaatcgtggttgacttcaaaggaattgctttgcagctcaaaggccgcgctttttcacgcatgagttccagctcgtccttgaacgaaggatggcaatgtgttccaaaaccaagccagagaatggaacacgaacagccccctgctcactgccttgcaagcgaccccgaagccccttcaactgtgacctggcacccaatgtcaaagcttcctggcaac

SEQ ID NO: 64 - protein, 500 aa, Thraustochytrium sp.
MGPRVASGKVPAWEMSKSELCDDRTVVFDYEELLEFAEGDISKVFGPEFKVVDGFRRRVRLPAREYLLVTRVTLMDAEVGNFRVGARMVTEYDVPVNGELSEGGDVPWAVLVEAGQCDLLLISYMGIDFQCKGERVYRLLNTTLTFFGVAKEGETLVYDIRVTGFAKRPDGDISMFFFEYDCYCNGKLLIEMRDGSAGFFTDEELAAGKGVVVTRAQQNMRDKIVRQSIEPFALAACTHKTTLNESDMQSLVERNWANVFGTSNKMAELNYKICARKMLMIDRVTHIDHHGGAYGLGLLVGEKILDRNHWYFPCHFVNDQVMAGSLVSDGCSQLLKLYMIWLGLHLKMEEFDFLPVSGHKNKVRCRGQISPHKGKLVYVMEIKKMGYDQASGSPYAIADVDIIDVNEELGQSFDINDLASYGKGDLSKKIVVDFKGIALQLKGRAFSRMSSSSSLNEGWQCVPKPSQRMEHEQPPAHCLASDPEAPSTVTWHPMSKLPGN

SEQ ID NO: 65 - DNA, 1500 bp, Thraustochytrium sp.
  CDS (1)..(1500)
cctacgccgttcttctccccttcatcttaccctccgagggcaatttgcttcatccctttcccgggcaatccccttgacaacaactgcaaggctggagaaatgcccctgaactggtacaacatgtcagagttcatgtgtggcaaggtttctaactgcttgggcccagaattcgcacgctttgacaagtcgaacaccagccggagccctgcttttgacttggctctggtgacccgagttgttgaagtcacaaacatggaacacggcaagtttctaaacgttgattgcaatccaagcaaaggcacaatggtgggggagtttgactgtccccaagacgcgtggttctttgatggttcgtgcaacgacggccatatgccgtattccattatcatggaaatcggactgcaaacctcaggtgttctcacctcggtgttgaaggcaccgctgactatggacaaggatgacattctctttcgaaacctcgatgcaagtgctgaaatggtgcgtccagacgtggatgttcgcggcaaaacgattcgaaacgtgaccaagtgtaccggctatgcaatgttgggaaagatggggattcaccggttcacgtttgagttgagcgttgacggcgtggtattttataaaggatccacttcctttggatggttcactcccgaggtgtttgctcagcaagctggactcgacaacgggaaaaagacggagccctggtgcaagactaacaacacctcggttcgaagagttgaaatcgcatccgccaaaggaaaagagcagctgactgagaagcttcccgacgcaactaatgctcaagttcttcggcgttcagagcagtgtgaatacctcgattacctcaatattgcccctgactctgggctgcatgggaagggctacgcccacggacacaaagacgttaacccgcaagactggttcttctcttgccacttttggttcgatcctgtaatgccaggatctttaggaattgaatcaatgttccagcttatcgaggcctttgcggtggaccaaaacattcctggagagtacaacgtatccaatccgacctttgcccatgcaccaggcaaaacggcgtggaaataccgaggccagctcacaccaaagaaccgtgcgatggactgcgaggtgcatatcgtttcaattaccgcctcccccgagaacgggggctacgttgacatcgtggccgatggagcgctttgggtagatggacttcgcgtgtacgaagccaaagagcttcgagttcgtgtcgtttcggcaaaacctcaagcaattccggatgtacaacaacagccacctagcgcaaaggcggacccggggaaaacaggagttgcactttcgcccactcagctacgcgacgtcctgcttgaagtggacaatccattgtatcttggtgtagagaactccaatttggtgcagtttgagtcgaaacctgcaacttcttcacgtatcgtttcgatcaaaccgtgctcgattagtgacctt

SEQ ID NO: 66 - protein, 500 aa, Thraustochytrium sp.
PTPFFSPSSYPPRAICFIPFPGNPLDNNCKAGEMPLNWYNMSEFMCGKVSNCLGPEFARFDKSNTSRSPAFDLALVTRVVEVTNMEHGKFLNVDCNPSKGTMVGEFDCPQDAWFFDGSCNDGHMPYSIIMEIGLQTSGVLTSVLKAPLTMDKDDILFRNLDASAEMVRPDVDVRGKTIRNVTKCTGYAMLGKMGIHRFTFELSVDGVVFYKGSTSFGWFTPEVFAQQAGLDNGKKTEPWCKTNNTSVRRVEIASAKGKEQLTEKLPDATNAQVLRRSEQCEYLDYLNIAPDSGLHGKGYAHGHKDVNPQDWFFSCHFWFDPVMPGSLGIESMFQLIEAFAVDQNIPGEYNVSNPTFAHAPGKTAWKYRGQLTPKNRAMDCEVHIVSITASPENGGYVDIVADGALWVDGLRVYEAKELRVRVVSAKPQAIPDVQQQPPSAKADPGKTGVALSPTQLRDVLLEVDNPLYLGVENSNLVQFESKPATSSRIVSIKPCSISDL

SEQ ID NO: 67 - DNA, 1410 bp, Thraustochytrium sp.
  CDS (1)..(1410)
ggcgataagtcttttatggaaacgtacaacgtgtcagcacctctgtatactggagcaatggccaagggcattgcatccgccgacttggtcattgctgctgggaaacgcaagatacttggatcgtttggtgcgggagggctgcctatttccatagtccgtgaagcactggagaaaattcaacaacacctgccccacggcccctacgctgttaacctcattcactcgcctttcgacagcaacttggaaaagggcaacgttgacctctttctcgagatgggcgtgacagtggtagaatgcagcgcgttcatggaactcacggcccaggttgtccggtaccgcgcgtctggtctaagcaaaagtgcggacggttcgattcgcattgctcaccgtattattggcaaggtttccagaaccgagctggcagaaatgtttattcgtccagcaccacagcacctcctccaaaaactcgtagcctccggcgagctgacagctgagcaagccgagcttgcaacacaggttccggtggcggatgacattgcggtcgaagccgactcgggggggcataccgacaacaggcctattcacgtcattcttcctctaatcatcaacctacgcaaccgtttgcataaagagcttgactacccttcgcatctccgggtacgtgtgggtgctggtggtggtattggatgtcctcaagccgctcttgcagcatttcaaatgggggcagcgtttttaatcactggaacggtgaaccagcttgctcgtgaaagtggcacttgtgacaacgtccggttacagctctcaaaggccacgtatagcgacgtgtgtatggctcctgctgccgatatgtttgaccaaggcgtggagctgcaagtattgaagaaaggcacgctgttcccaagtcgtgctaagaagctgtacgagctgttctgcaagtatgactcgtttgaggcaatgccggctgaagaattgcaacgggttgaaaagcggatttttcaaaagtcgcttgctgaagtttggcaggagaccagtgacttttacattcatcgtatcaagaaccctgagaaaatcaatcgtgctgcaagcgatggcaaactgaaaatgtcgctttgctttcgctggtaccttgggctttcctcattttgggccaactctggggcacaagatcgcgtcatggactatcaaatttggtgtggccctgctattggcgctttcaatgattttaccaagggcacgtaccttgacgtgactgttgcaaagagttacccttgtgtggcacagatcaatttgcaaattttgcaaggagctgcgtatctgaaacgccttggtgtcattcgttttgaccgcatgctgctgcaggccgtcgatatcgacgatcctgtatttacttacgtgccgacccagccactt

SEQ ID NO: 68 - protein, 470 aa, Thraustochytrium sp.
GDKSFMETYNVSAPLYTGAMAKGIASADLVIAAGKRKILGSFGAGGLPISIVREALEKIQQHLPHGPYAVNLIHSPFDSNLEKGNVDLFLEMGVTVVECSAFMELTAQVVRYRASGLSKSADGSIRIAHRIIGKVSRTELAEMFIRPAPQHLLQKLVASGELTAEQAELATQVPVADDIAVEADSGGHTDNRPIHVILPLIINLRNRLHKELDYPSHLRVRVGAGGGIGCPQAALAAFQMGAAFLITGTVNQLARESGTCDNVRLQLSKATYSDVCMAPAADMFDQGVELQVLKKGTLFPSRAKKLYELFCKYDSFEAMPAEELQRVEKRIFQKSLAEVWQETSDFYIHRIKNPEKINRAASDGKLKMSLCFRWYLGLSSFWANSGAQDRVMDYQIWCGPAIGAFNDFTKGTYLDVTVAKSYPCVAQINLQILQGAAYLKRLGVIRFDRMLLQAVDIDDPVFTYVPTQPL

SEQ ID NO: 69 - DNA, 39669 bp, Sh. japonica
gatctggcgataacttactccccattccactgtatcagctgcctgcaacctttaacggcgatcataaacgcgtcattcgctggcagacagagtggcaagcctgtgatgaattacaaatggcagcggccacaaaggctgaatttgcagcattagaagaaattaccagtcatcaaagtgatttatttagacggggctgggatatcaggggcggagttgagtatttaactaaaatcccaacttattattatttataccgtgtcggtggcgaaaaccttgccagtgaaaaaaaccgagcttgtccacgttgcggctcaaaagcgtggcgtttagatgagccattattagacatgttccactttaggtgcgagccatgtcgaattgtatcgaatatctcatgggatcatcagtaaaattatcttctcgtcaatagatactaatacaacgagttagctgataacgcattatcggttcattcaataaaaaagccagaccgcatctatagcctgatctatagcctggcttttttattttatgtccgaataagcaattatttcttgcctttaatcaaatcattccacatcattttcattcgctgccaaatacctggatgagcaacatattcctctacaatcggctctaccggcggcgttactcgtggtgttagcgcatcaataaattccgcaagactatcggctaatttatctttgggcctatcacctggaatttcaatccacacactgccatcttcattatcgacagtaatcatctgttcgccatcacctaaaacgccaacaaaccaagttggtgcttgtttaagctttttcttcatcattaagtggccaattacattttgttgcaaagattcaaaatcttgctggttccaaacctgcagtaactccccttcgccccatttagaatcgaaaaaaagtggcgcagaaaaaaactcaccataaaaggcattaatgtcttgatgaagcttgatgtctaatgcatgttctacattactgaaatctgaattactttttcgttttaccgctttccaaaaaaccgcaccgtcagattcaagatcatacttgccttcaatacaagcggatccttgcccaagtgggaaataacggggtaactcgtctaatacatcctgataagcttgtatataacggctagaaaaatgttccaatgaagttgaacaagacacttaagatgctccagttttgggttataataaaagtctattttgacacggaaacagactagatgacacacaatcacgacccctatagtgatgcagatgcacttaaaggactcactttaggtcaatcgacgcaatatcaagcagaatatgatgcttcactgctgcaaggggttcctcgtaaacttaatcgcgacgctattgaattaactgatactctgccgtttcaaggggcagatatttggactggctacgagttatcttggttgaacgccaaaggtaaacctatggtcgcaatgattgaagtttaccttgctatcgaaagtgataatttaatcgaatcaaaatcgttcaagttgtatttaaacagctttaaccaaacacgttttgacagtgtagaccacgttcagcaaaccttaaccactgacttaagccaatgcgctaatggtaaggtaacagtgaaagtgattgagcctaagcatttcaatactcaacgtattgttgaactacctggcaattgtatcgatgagctagatattgaagtcaatgattatgaatttaaccctgagtacttgcaagacagcactgaagagaaaaatgttgtcgaaacactcacatcaaacttattaaaatctaactgtttaatcacttcacagcctgattggggaagtgtgatgatccgttatcaaggcccaaagattaatcatgaaaagctattgcgctatttaatctcattccgccaacataatgaatttcatgagcaatgtgtagagcgtatttttaccgacctaaaacgatactgtcattgtactaagctcactgtttatgcacgttatactcgccgcggtggattggatatcaacccattcagaagcgaccttgagcaacctccagagacgcaccgtttagcaagacaataaatagcttattcatcaatcagcttaatgaataaagcctaatccctaggctttattcatttattttctgtcgtaataccgagcccttcatgcctacagacaatgttacttgtttaacaccaacaactgacgatattcagtcccataagcatttcaaaatatttaaaccctttggttttttaagtcagtttgtgcctgaaactcgaaagaaaaaacacttattgggcgagttatgtcagtttccagataaaaccatggcaattggtcgattagaccatgattctgaaggcttattactgctaacaactgacggcatgatgagccataaagtgagaagtaaaggcatcgaaaaagaatattatgttcaagtggatggcgatatcgatgacaaggcgatgtcacaactacaaaacggagttgaaattggcattaatagcacgaaatatctcactcagccctgtaaagcagtcaagctaaacgcagagccaatacttccctcacgcggtaaaaaaatccgcgatccaagacatggccccaccagctgggtttcaatcacattaactgaaggtaaaaaccgtcaaatcagaaaaatgaccgctgccgttggctttgccacattaaggcttgttagggtcagaattggtaatatacatattgatgatatgcgagctggcgacgttattgaactcaataacttagattcagtaataaaccctaaccttagctaacccataaaacggggctattcatttatcggcttaccttactagttattggttaaatacactttctccatcgcagactccaccagctcccgtaaccactttatcgcagggtcttgatgattacgtgttggccaaatactgtaaatcgaaatcacttggctttcaaaaggcaagtccatcaaaattaaattaaaaatagattgatagtttttcgcgtaggtataaggcgcaatacatatggcatcggatttactcacgccagataacatcgtcagtaaagaggatttttcaccatacatatctcgttcaggtaaatggtctgttgaaatcatctctgcaactcgctggttatgacgatgaagtcgataaaacagatgcttagcagcgaagtacgacacttcatctattccatgtttaaattgcgggtgctcagccctagcaacacaaacaagcttttcggtggcaatttgcttactggtaaagctcgcttcagttggcgcaacaatatctagcgctaaatcaatttgctgatttttaagggcttgatataaattaccctcatctaaaatcgcttctgtaaaaatgatttcaacgcctttatccgtcagtgacttttcgatatctgcttcaatcaaatcaataattgattcattagcgctgacatgaaatatccgttttgacaacgaagggtcaaaggctttaacgctattaatgcattgttcgatttcgatgagtggcaaacttaactgtcggtgcaagtgctgacctatcgcagtgagagctatccctcttccttgcctaataaatagttcaacacccacaaccgctttaaaccgattgatagcattactgactgacgactgagttaatgcaaggtgctccgctgcaagcgtaatagattgataatcacatacacagcaaaaaactctaataaggttaagatccaacttaagtaattgttgttgcataagagcatcagactctaagttctcttgcttcatcacttctcccataacacatatcgccaaatacattcacacggtaaatgtattaaccatttttagccatagttatatttgggctttttattgttaacttatctttaacaataaaaagtacccgaggcctacatgagaaaaacacgagttgctttagtcatcagtttatcatttaccaatgcagtggctgctgcgcagcacgaacatgaccacatcagtcttgattaccagggtaagcctgcgacgcccattaccgcagagcacaacaaagccatagcacaaaagttaccgttcgaagataaatccgcttttgagcgctttagtcgacataaaattgcctcttttgatgaagccaccgccaagatactgcgtgcagaatttaactttatcagtgacacgcttcctgattcagtcaacccttcgttatatcgccaagctcaacttaatatggtaccagacgggctctataaagtgactgatggcatttaccaagtacgaggcactgacttatctaacttaacccttattcgaggtaaaacgggttggattgtatatgacgttttattaactaaagaagctgttcagcaatcattaacatttgcttttgctcacttgcctgagggcaaagatttacctgttgtggcaatgatttactctcacagccatgcagatcatttcggtggtgcccgtggcgttcaggaacgctaccctgatgtcaaagtgtatggttcatataatattacccaagagatagtggatgaaaatgtactcgcgggtaatgtcatgagccggcgagctgcttaccaatacggcgttacactcgataaacacaatcacggaattgtcgatgcagcgttagcaaaaggtttatcaaaaggcgaaatcacttacgtcaaacctgattatgaacttcatcatcaaggcaaatgggaaaccttgaccattgatggtcttgaaatggtctttatggatgcatctggcactgaagctgccagtgaaatgatcacatatataccatctatgaaggcgctatggtcaggcgaattaacatatgatggtatgcacaatatttataccttacgaggcgctaaagttcgcgacgcattaaaatggtctaaagacattaacgagatgattaatgcatttggcgaaaatgttcaggtactatttgcttcacattctgcgccggtatggggaaataaagaaattaatcattaccttcgcatgcagcgagataattatggcctcgttcataatcaatctttacgtttagccaatgaaggtgtggtaatacaagatattggtgatgcaatcatggaaaccattccacaaaatgtccaagacgaatggtacaccaatggttatcacggtacatacagccataacgctaaagctgtgtacaacatgtatttaggctattttgatatgaatccagccaacttaaaccccttacctacaaaggctgaagcaattaagtttgtagaatatatgggcggcgccaacaatgtagtatcaaaagcgcaagcagacttcaatcaaggcgagtatcggtttgtcgccactgcattaaataaggtggtcatggccgaaccacaacacccccaagcccgagaattacttgccgatacctatgagcaacttggctaccaagccgaaggagctggttggcgaaatatttacttaacaggtgcgcaagagttacgtattggcattaaacctggcgcacctaaatccgcatccgctgatgttatcagcgaaatggacatgtccactttatttgactttctcgcggttaaagttgacagcattaacgccgccaagcttggcaatatcactttaaatgtggtgacacaaagcggcgataaaactgacacgctctttgtagagttaagtaacggaaacttgagtaatatcaaagtagacgaggctaaaaaagccgatgccacactgacaattaataagtctgatgtcgttgcaatattattaggtaaagcagatatgaaagcgttaatgcaatcaggagctgcgagtatgcaaggtgacaaattagcatttgccaaaattgcatcaacactggtgcaatttaatcctgattttgaaatcgtaccgctacagcatactcattagctcataacttaacgaaattcggctgcgaagtttttcactctgcttctttgcttatattcactagtttaccaagagtaatggcatgagagtttaaagcaaaaatgaccgactaagacaagtgagggaagattgttctgataagccgtttttgattagcagttaaacatccaaaaaaccttaacagttcgataaatcagttggtttttatgaacatttttatttgttcatgccagctgattttttttgcctttaattgaagtgttaatggcttttcgccaaaagcgaactcgcccacactcacagcaaatcgatatgaattattaagcttacctaaacaacattgccataaaggtgagacttcataaaaagactcaacatcattagtctgttcaagctcatcaacgtctgtaggcttcaataagctaagtgaaatatcatgctgaattggcaacaactgatcatctattgttaagttagctaagctcggtgcagataagtcaaatgcaaacgatttaagcgacaaggccagtcccagtccctttgctttaatataagattctttcagtgcccataaatcgaaaaatcgctcacgctgctgactttcaggtaacgccaataatgcagtttcttctggttttgaaaaatagtgatgtaaaattgaatggatattcgtgctttctcggcgacgttcaatatcgacccccaattgaatgggcattgaagcgtcctctttggagtgaatgacaccaataagcaaccagttaccactgtgacttaaattaaactgtaagcccgtttgtttatattgcacagccgatagcctaggtttgcccttctcaccatactcaaattgccaatcgtctggttcgatatttgcaaagttcgataatacgctgcgcaaatacccacgcaccattaacccttgctgttgagcagcctgttgaataaaacgatccactttatttatctcagcatcagataaccatgaacgcactgtagagacggttttctcatctaataaattggtatctaaaggacaaaaaaataattgaatagtgggtaaagggctcaaaccaaactcgcatttataatagcaataagacattgtcgcttgttctaggtcgctaattcaacacataaacaatcttgattgaaaatgtcgtctaaggtttaaacaaataaaggaaggtttagacaaataaaaaagggttaagccatccttaaccctttgcatatcatctgttatttcaataagtattagccaatcaatctaccagtgcttttaccgcctttttaggtaaaacatcataacggctaaactgcattgaaaactgaccttctccacctgtcatagatttaagctttgaagagtagctactgacattggcaagtggcacttcaacgctgacttcaacaagtccattggcatttgcctgcgttccacaaataatgcctctagatgcactaatgtcacctgtcacttcgccgacatgctcttgcccaactaaaatgctcatatcaactaatggttctaacattacaggttttgctaacgatactgcttctataaaagcttttttacccgccatcacaaaagcaatttctttagagtctacactgtggtgtttgccatccaataacgtgacttttatgtcttgtaatggatagccacctaactcaccggctagcatggcttctcgcacgcctttctctactgctggaatatattgacttggcactgagccaccaaccaccttcgaaataaactcaaagccttcaccacgctcaagtggctcaatggctaattcaacttcaccaaattggccagatccgcctgattgttttttatggcgataacggcattgtgctttctcggtgatggtttctcgataagccaccgccggcgtatcagtatccatgtcgaggtggaacatattttgcgctttttcaagcgcaatttttaaatgcaaatccccttgaccttgcaatacggtttgcccttcaacctcacttcgagtgatgtgtaaacttggatcttcagcgaccagtttattgagaacatcggagatcttttgttcatcaccacgacgcttggctgatacagccaaaccaaaaataggttgcggcacttccagttctggtaaatgaaattcatcttcatcatggctatcatgcagtacagaaccaacacttaatgcatccaattttgcaatagcgcaaatatcgccaggaaacgcttgggatacattaatttgtttatcgccttgaagcttcattaagtgagagactttgaaaggtttgcggccttggccaataagcagcttcatgccaacattcagcgtcccttggtacaacctaaatacgcccagtcttcctaaaaatgggtcaattgaaacgctaaacacatgggctaaaacatgatctgttgccttttgtgtcactgttactggtgtcgactgttcaccaaatcctttcataaattgtggtgcattggcttcaagtggacttggcatgagtttgatcaacatttctaacaatgaactaatcccaatatcttgttctgcacttgtaaagcagactggcactaagtgccccattctgagtgctttttctagcggagcatgaagctgctgaggcgttaacgactcaccttgctctaaatacaaggtcattaacgcttcatcttcttcaagtaccgtatcaactagctcatctctagcactagcaggttgactaaataatgtctctgcactttcatcacaatgtaaataacaatcaacaacggcttttccatcggcactgggcaagttaaccggtaaacatcggtgtccaaattgatgctgaatgtcgatcatcacatctgacactcgcgtgagattactgtcgaggtggttaatggcaataatcaccgctttaccttgcgctcttgcagcttcaaaagcacgtttagtcacagactctataccaacggcggcattaataaccaacagtactgactcaacggcaggcaaaggtaataaggctcgcccgaaaaagtcaggtaaacctggcgtgtcgataaaattgatatgatgctgttgatactgaaggtgtaaaaatgaaggctctaaactgtgacggtgggatttttcttgggcagtgaaatcagcatgatttgtgcccttgtcgaccctgccttttaacgatattgccttagctctatacagcaatgcttcaagcaaggatgatttgcctgctccaacatgtccgagcacagccaaattacgggtttgctcagtagtaaactcagccataatggcctcctgttttcacattattaaactttccatattcttgtctaactttgtttacgtttggctatttattgcgcataaaaatagcatacggggctaacaactcagatgaattgacctagatcagtgtttacatcggcaacgttttttataacaaaatcacccattcggcttacaagtgttagctaattctggtcgtatcagtgattaattagtttcgggtgattgtatcgacccgaaacctcaggtactctgcatgctcgattgtgctaaaacgctaattttgaagatgaacaaacgttaatcttcacgtttttataccgagtcccaacagattgtacggagtattcatcgaactatggcagtccttaaatgaccgcaaatagaaaagctcacgctgtaactcaaacagccgctaagaaagccacatcagaaaccgatgttgcgatggcccctgttcgccatagcaatgcaacaacgactcctgaaatgcgtcaatttattcagacttctgatttcagtgttagtcaattggctaagattcttaatatctcggaagccactgtcagaaagtggcgcaagcgcgactcaatcagtgatacgcccaatactccacatcatttgaaaaccacgctttcaccaatggaagaatacgtggttgtgggacttcgttatcaattaaaaatgtcactggatagattgcttcacgtcacacaacaatttatcaaccctaacgtctctcgctctggtttagcccgatgtttaaagcgctacggcatatcaaaactagatgaatttgaaagccctcatgtgcctgagtgttattttaatcagctgcctattgttcagggtacagatgtagcgacttatacactgaaccctgaaacgctcgctaaaacccttgcattacctgaagcgacaccagataacgttgtacaggttgtatcgttaacgattccacctcaactcactcaagcggacagttattccattttgctcggtgtcgactttgcaaccgactgggtgtatctcgacatatatcaagacaatcacacacaagcgacaaatcgttatatcgcttatgtgttaaagcacggcccgtttcatttacgtaagttattagtcaaaaattaccacacctttttagcccgctttcctggcgcaacagttttacaatccacggaagcggcaaaccaaaaaaataaatcagctaaggatcagctgaacactggagactcaaaatgagccaagcccctacaaatcctgagacaagctctcaagataataacgagtcgcaagatacaagactgaataaacgtcttaaagacatgcccattgccattgtcggcatggccagtatctttgccaactctcgttacctgaataagttttgggacttaatcagcgaaaaaattgatgctattaccgaagtacctgatacccactggcgcgctgaagattactttgatgctgacaagagcaccccagataagagctactgtaaacgcggtggttttatccctgaagtggactttaacccaatggaatttggcctgccgccaaatatcctagaactgaccgatacttcgcaattattgtcattagtgattgccaaagaagtgctagcagatgctggtgtcacttctgaatatgacactgataaaatcggtattactttaggtgtgggcggtggccaaaaaattaatgccagcctaacagcacgtctgcaataccctgtgcttaaaaaagtatttaaaagcagcggcctaagcgatgccgacagcgacatgcttatcaaaaaattccaagaccaatacattcactgggaagaaaactcgttcccaggatcgcttggtaatgttattgctggtcgtattgctaaccgctttgacttaggcggcatgaactgtgtggttgatgcggcatgtgcaggttcacttgcggcaatgcgtatggcgttaaccgaactggttgaaggccgcagcgaaatgatgatcactggtggcgtatgtaccgataactcgccatcgatgtacatgagtttttcaaaaaccccagcgtttaccaccaatgaaacgattcagccatttgatatcgactcaaaaggcatgatgattggtgaaggcattggcatggtggcattaaaacgtcttgaagatgctgagcgtgacggtgaccgtatttactcagtcattaaaggggtcggcgcttcatctgatggtaagttcaaatcaatttatgcacctcgacctgaaggccaagctaaagcgctgaagcgtgcttatgatgacgccggctttgcacctgaaaccgttggcttaattgaagctcacggaacaggcactgcagcgggtgatgtggcagaatttaatggtcttaaatctgtatttggtgagaatgactcaacaaagcaacacattgctttaggttcagttaagtcacaagtgggccatactaaatcaactgcgggaaccgcgggtgtgattaaagcggcgttagcactgcatcataaagtgctgccgccaaccatcaacgtctctaagcctaaccctaagcttaatgttgaggattcaccgtttttcattaacactgaaactcgcccttggatgcctcgccctgatggcacaccacgccgagctggtataagttcgttcggttttggtggcacaaacttccacttagtactagaagaatacagcccagagcacagccgtgatgagaaatatcgtcagcgccaagtagcacaaagcttattgattagcgctgacaataaagctgagctcattgcagaaatcaacaagcttaacgctgacatcagcgcgcttaaaggcacagataacagcagcatcgaacaagctgaacttgcccgcattgctaaactatatgctgttcgcactttagatacttcagcagcccgtttgggtcttgtggtctcaagccttaatgaattaaccactcaacttggtttagcgttaaagcagctaagtaacgacgctgaagcatggcaattaccatcaggtacgagctatcgctcatctgcgctcatcacgattaatgccaaccaaaagacgactaaaggtaaaaaagcagctaacacaccgaaagtagcagcattatttgcaggtcaaggttctcagtacgtcaacatggggattgatgttgcttgtcacttccctgaaatgcgccagcaattaatcaaagccgacaaggtatttgcaagctttgataaaacgccattatcgcaagtgatgttcccaattccagcctttgaaaaagcagataaagatgcgcaagcagctttactcaccagcactgataacgcgcaaagcgccattggtgtaatgagcatgagccaataccaactgtttactcaatcaggttttagcgcagatatgtttgcaggtcacagctttggtgagctttcagctctttgcgctgctggcgttatttctaatgacgactactaccaattatcctatgctcgcggcgcttcaatggccgcatcagcagttgataaagatggcaatgaattagataaaggcacgatgtacgccattatcttgccagctaatgaaaatgatgcagcaaatagcgataacatcgctaaattagaaagctgcattagcgagtttgaaggcgttaaggtggctaactacaactcagccactcagctagttattgcaggcccaacacaaagctgcgccgatgcagctaaagccattgccgctttaggctttaaagctatcgcgctacctgtttctggcgccttccacacaccacttgtggggcatgcgcaaaagccatttgctaaagccattgataaagctaagttcacggcgagcaaagtcgacctgttctcaaatgccactggtgacaaacacccaagtgacgctaaatcaattaaagccgctttcaagcaacatatgctgcaatcagttcgttttactgatcagctgaacaatatgtacgatgcgggagcgcgcgtatttgtcgagttcggccctaagaacattctgcaaaaactggttgaagcgaccctaggtaataaagctgaagcggtatccgttatcagtatcaatccaaaccctaagggcaacagtgatgtgcaacttcgtgttgcagctatgcaacttagcgttttaggtgcgccactctcaagcattgacccttatcaagctgaaatcgcagctcctgcggtaccaaaaggcatgaacgttaaactcaatgcaaccaaccacatcagtgcacctactcgtgccaagatggaaaaatcattagcaacaggccaagtaacctctcaagttgtcgaaacaattgttgagaaagttatcgaaaaacctgttgaaaaagtagtagagaagatcgtggaaaaagaagtcattaaaactgaatatgttgaagttgccacatctggcgcaacaacagtgtctaacgttgcgcctcaagcaatagcacctcatgcatcagctcaggctgctcctgcttctggcagtttagaagcgttctttaatgcacaacagcaagccgctgatctgcatcagcaattcttagcgattccgcagcaatatggtgacacctttactcacttgatggcagagcaaagtaaaatggttgctgcaggccaagccattcctgaaagcttgcaacgctcgattgagttattccatcagcatcaagcgcaaacgctacaaagtcacaccctgtttttagaacaacaagctcaggcaagccaaaatgcattaaacatgctaacgggtcaaacacctgttactgctcctgttgttaacgcaccaattgttaattcaccagtagttgaagcggtgaaagtagcacctcctgtacaaactcctgtcgtaaacacgccagtagtaccagcagtaaaggccacacctgtagctcaacctgctgcgatggccgctccaaccccacctgttgaaccaattaaagcacctgctcctgtagccgctcctgtagtaagtgcacctgtagttcctacccctgctggcttaagcgcacaaacagccctgagctcacaaaaagttctggatactatgttagaagtggttgcagaaaaaaccggttacccaactgaaatgcttgaacttagcatggacatggaagcagacttaggcatcgattcaattaaacgtgttgaaatattaggtactgttcaagacgaactaccaacactgccagaactcagtcctgaagatttagctgagtgtcgtacattgggcgaaatcgttgactatatgggtagtaaactaccggccgcaggcgctatgaacagcgacactgcaaatgcaactcacacagccgtttccgcccctgccgcttcaggtcttagcgcagaaacagtactcaacactatgcttgaagtggttgcagaaaaaacaggttatccaactgaaatgcttgaactaagcatggacatggaagccgatttaggcatcgattcaattaaacgtgttgaaatattaggtactgttcaagacgaactgccaacaccgccagagctaagccctgaagatttagctgagtgtcgtacactgggtgaaatcgtatcttatatgggtagtaaactacccgccgcaggcgctatgaactctaaacttcctgcaagtgccgctgaagtagctcaaccccaaaccgcgccagttcaagctgcatctggccttagcgctgaaacagttctgaataccatgctagaagtcgttgcagaaaaaaccggttacccaactgaaatgcttgaactcagcatggacatggaagccgatttaggcatcgattcaattaaacgtgttgaaatattaggtactgttcaagacgaactgccaacactgccagagctaagccctgaagatttagctgagtgtcgtactcttggtgaaatcgttgactacatgaactctaagctacccgctgctggttctgccccagttgcatcaccagttcagtctgcgactccggtatctggtcttagcgctgaaacagttttgaataccatgctagaagtcgttgctgaaaagactggttatccgactgatatgcttgaattaagcatggatatggaagccgatttaggcatcgattcaatcaagcgtgttgagatattaggtactgttcaagacgagctgccaacactacctgaactcagccctgaagatttagctgagtgtcgtactcttggcgagatcgttgactatatgggtagtaaactacccgccgcaggcgctatgaacactaagcttcctgctgaaggcgctaatacacaggccgccgcaggcgctgctcaagtagcagctactcaaacatcaggtttaagtgcggaacaagttcaaagcactatgatgacagtggttgctgagaagaccggttacccgactgaaatgcttgaattaagcatggatatggaagcggatttaggcatcgattcaatcaagcgagttgagatcttaggtacagttcaagatgaacttccgacgctaccagaacttaaccctgaagatttagctgagtgtcgtacacttggtgagatcgtttcgtacatgggtggtaaactacccgccgcaggcgctatgaacactaagctacctgctgaaggcgctaatacacaggccgcagcaggcgcttctcaagtagctgcctcaaccgcagaaacagccctgagcgctgagcaagttcaaagcaccatgatgactgtggttgctgaaaaaaccggttacccaactgaaatgcttgaattgagcatggatatggaagcggatttaggcatcgattcaatcaagcgtgttgaaattttagggacggttcaagacgagcttccgggcttacctgaattaaatcctgaagatttagcagagtgtcgcaccctaggcgaaatcgtatcttatatgggcgctaaactgccagccgcaggcgctatgaacaaaaagcaagcgagcgttgaaactcaatctgcacccgcagcagagttagcaactgacttacctcctcatcaggaagttgcgctaaaaaagctaccagcggcggataagttagttgacggtttttcaaaagacgcctgtatcgttatcaatgatgacggccataacgcaggtgttttagctgaaaaattagtagcaacaggcctaaccgtcgccgttattcgtagccctgagtcagtgacatctgcgcaatcaccgcttagcagtgatattgccagcttcactttatctgcggtcaatgacgacgcgattagcgatgtcattgctcaaattagcaagcagcataagatcgccggttttgttcacctacaacctcaactaacagcacaaggagctttgcctttaagtgatgctggttttgtagcagtagagcaagctttcttgatggctaaacacctacagaaaccatttgctgagctagcaaaaactgagcgtgtcagctttatgactgtcagccgcatcgatggtggctttggttacttaaacacggctgaacttgccaaagcagagctaaaccaagctgcattatcaggtttaactaaaacattaggtcatgagtggccaactgtgttctgtagagcattggatattaccccaagctttgaagctgtcgagttagcacaagccgttattgcagagctatttgatgttgatacagcaacagctgaagtgggtattagcgaccaaggtcgtcatactttatcagctacggcaactgctcaaacccgttaccaaaccacatctttaaacagtgaagatactgtattggtgactggcggtgctaaaggcgtcacatttgaatgtgcccttactcttgccaaacaaactcagtcgcactttattttagcgggtcgcagtgagcatttagccggtaatttaccgacttgggcaaagagtgtcatagcggctgcgcctaacgttagtgaagtaaacacaagtcagttaaaagcagcagcaatcggatttattcaatctcaaggtaacaagccaacacctaagcaaattgatgccttagtttggccgattaccagcagtttagaaattgatcgctcattagcagcatttaaagctgtcggtgcaagtgctgagtacatcagcatggatgtcagctcagatgcagccatcaagcaatctcttgcaggtgttaaaccgattacaggcatcattcatggtgcaggtgtactcgctgataaacatattcaagacaaaaccttagctgagttaggccgtgtatatggcactaaagtgtcgggctttgcaggtatcatcaatgcgattgatgcaagcaagttaaaactggttgctatgttctcatcagcagccggcttctatggcaatactggccaaagtgactactcaatgtctaatgagatcctcaacaagacagcacttcaacttgcagctaactacccgcaagctaaagtaatgagctttaactggggcccttgggatggcggaatggtcagttcagcattgaagaaaatgtttgttgagcgcggcgtatacgttattccactcgataaaggcgcaaacttgtttgctcacagcctattgtctgagtcgggcgtacagttattaattggttcaagcatgcagggctcaagctcagcagataaaacaggcgcagctgtaaaaaagcttaatgcggactcttcgcttaatgccgagggttcgctgattctttcttttactactcctgctaaccgtgttgtcaacaacgcggttactgttgaacgtgtactaaacccagtagcaatgcccttccttgaagatcattgcatcgcgggtaatccagtactaccgacagtgtgcgccatacaatggatgcgtgaaacagcgcaacaattgtgtggtctgcctgtgactgttcaagattataaattgctgaaaggcattattttcgagactaaagagccgcaagtattaacgctaacattgacgcaaactgaatcaggcttaaaagcactgatcgcgagtcgtatgcatcgcgatccaatggatagcttgctaagacctcagtatcaagcaaaccttgtgatcaatgaagccgtcattaacggtcaaactttaacaacacagccaactatcgttgcggatgcacaacagttagcaagtgcaggtaaagtgattagcactgacagcgaactttattcaaacggtagcttatttcatggaccacgcctgcaaggcatcaagcaagtcttgattgctgatgacacacaactggtttgcaacgtggaattaccacatattagttccgcagattgcgcaggctttgcgcctaatctgtccataggtggcagccaagcatttgctgaagatttgctactgcaagccatgttagtgtgggcacgaattaaccatgatgctgcaagcttaccatcgactattggtaagttaacgacttattcaccatttgcatcaggcgataaaggttacttggtgttatctgtgcttaagagtaccagccgttcgttaacagctgatattgcactttatcaccaagatggtcgcttgagttgcactatgagcagtgcaaaaacaacaattagcaaaagcttaaatgaggcatttcttgcccctgctaaagcaattgctgacttgcaggagtctgtgtgagcactcaactgactgcaaaaacggctgcaatcaatagtattcgtatagccttaaaactggtcgcgaatgatcaaacatcattcgcaccagcacaaaatgctgatgacatattttcagccataaaaccgtgttcattagcgcaggtcattggcgagtctgccattgaccttgaaattgatgtatcaagcttagatgcaggcatagataaccttgctacagcaagccaacaaacgcttagctttagtgattattttgcccaagcgattgcccatattgagcagcaacatactgtgttactgagccatccagcaataccgtatcgagtattgatgatgccagcgattgttgcagctaagcatcgctgtcatccccatgcctatttaacgggtttgggagaagctgatgatatgcaatgcgctatgcaaaacgctttagcacaagctaaacgtgagcacattactcctaccttggtcgatgtcactgagttaacttgttataaagacaagtttactcagcttgtcatgttgataagccgtattgctgcgcgtcgtttacctgacactacattgcctactgtcactagtgacaagcagaacaatagcaatcaagccaatgccaaatattggtttacccaaatgcaccaaaaccgtgttgctagctttaactttacagaaaatggcaagcaacacgctgccgtttttgttcaaggtactgaactggcccaggccagctcgatgcttgatgaaaacagactattcttccccttagcagccaatacatctgcttgcatgatccaatctttgcatgagctattagtggcgctcaataggcttaatcagcaacaaagcaatccgttagacagccagcggcttctaaacaagcctagccatgttatctctttaatgctcaattacttaaaggcatttgatcaaaccaaatccttgtctgcagttatcatagccaactctgtagtcactgcaatcgcagaaattgaggccatgttagccaaaatcagtacagcaagtgatgacacctctggatcgataaatgaacttgagtacaaaacgccttcgggtagttgtttaaccatcactcatcatgaagcgcttggtcgcagcggcgtgtgttttgtgtatccgggtgtgggtacggtttatccgcaaatgtttgcacaactgccacagtacttccccgctctgtttgctcaacttgaacgtgatggcgatgtaaaagccatgcttcaagctgattgtatttatgcagaaaatgccaaaacctcagacatgaatttaggcgagcttgctattgctggggttggcgcaagttatatattaactaaagtgcttaccgaacactttgccattaagcctgattttgcaatgggctattctatgggtgaagcatcaatgtgggccagccttaatgtctggaaaacgcctcacaatatgattgaagccactcaaactaatagtattttcacctctgatatttcaggccgactcgactgcgtccgtcaagcatggcaactcgaacagggtgaagatattgtttggaatagctttgttgtgcgtgctgcgccgactgaaatagaagccgtgcttgccgattaccctcgcgcatatttagcgattatacaaggtgatacctgtgtattagcgggttgtgagcaaagctgtaaagccttattgaaacaaatcggtaaacgtggcattgcagcaaatcgtgtcacagccatgcacacgcaacccgccatgcttattcgtgataatgttcaagcgttttatcagcaagctttgcacgaccaagatgtgcttgatgcacaagcaagtagcatcaaattcattagtgctgcgagtcaaatacctatttcattgaccagtcaggacatcgccaattccattgcagatacattttgtcagccactgaacttcactaaactggtgaataatgctcgtcatttaggtgcacgtttatttgttgaaattggcgcagataggcaaaccagtaccttgatagataaaattgcccgcactgcagctaataccgattcacatttaaacgcgccactgtcagccattgcaatcaatgccaaaggtgatgatcaaacagcgctgcttaaatgtatcgctcagcttatctcgcataaagtgcctttatctctacaatatctaactgagaatttatcccatttgttgaccgctagcattactcgcgaaaaccgtcagcaaagccaaaccgctcagttagctccacaattagaaggagaacaatcttgagttctcaatcaaacgttcccaaaattgccatcgtcggtttagcgactcagtaccccgatgctgatacgccagcaaagttctggcaaaatttattagataaaaaagactctcgcagcaccattagtcagcaaaagctcaatgcaaacccagctgactttcaaggtgttcaaggccagtctgaccgtttttattgtgacaaaggtggctacattcaagactttagttttgatgccaatggttaccgtattccagctgcgcagtttaatggtcttgacgacagttttttatgggcaacagacacggcgcgtaaagcactcaatgatgctggtgtggatatcactaacagtcaagataatgcgatattaaatcgcactggtattgtcatgggtaccttgtcgttcccaacggcaaaatctaacgaattgtttgtgccgatttatcacagcgccgttgaaaaagcgctacaagataagctgcaacaacccagtttcacattgcagccttttgatagtgagggatatagcaagcaaacaacgccagcctctttgtctaatggcgccattgcacataatgcatcaaaattagtggccgatgccctagggttaggcgcagcacaactcagccttgatgccgcttgcgcgagctcagtttactcattaaagctagcttgtgattacttgcatacaggcaaagctgacatgatgcttgctggtgcggtttcaggcgcagatcccttctttattaacatgggtttttctatcttccatgcttacccagaccatggcatttcagcgccttttgatagtaattcaaaagggttatttgcaggtgaaggtgctggcgttttagtgctcaaacgtcttgaagatgctgagcgtgatggcgaccatatttatgcactagttagcggcattggcttatccaacgatggtaaaggtcaatttgtactgagcccaaacagtgatggtcaagtcaaagcctttgagcgtgcctatgcagatgcagccatgcatgatgaacatttcggccctgataatattgaggtcatcgagtgtcatgccactggcacaccgctgggtgataaagttgaactgacctcgatggaacgtttttttaacgacaaactcaatggtagccatacgccattgattggctcagctaaatcaaacttaggtcatttgctgacggctgcgggtatgcctgggatcatgaaaatgatttttgccatgcgccaaggtatgttgccacccagtatcaatattagttcgccaattacatcaccaaatcagatgtttggccctgctacattacctaatgatgtattgccgtggcctgataaagcgggcaatcgtgctcgtcatgctggtgtctcagtattcggctttggtggttgtaatgcccacttattgattgagtcatatcacggacaaacgtcaacagctccagctgctaataccattaatgcacagttgcctatgcatattacaggcatggcatcacactttgggccgctgaataatattaaccgctttgccaatgcaataaaccagcaacaaacggcctttactccgctaccggcaaaacgctggaaaggcttagataaacatcctgagttattgcagcagcttggtttggcgcaaacaccgccaacaggggcttatattgatcagtttgattttgacttcttgcgttttaaagtgccaccgaatgaagacgaccgcctgatttcgcagcagttattgttgatgaaagttgcagacgaagcgattcatgatgccaaacttgcatctggcagcaaggttgctgtactggttgcaatggaaaccgagcttgaactgcatcaattccgtgggcgagttaatttgcatactcaaatcgcagccagcttaaatgcgcacggtgtcagcctatctgacgatgagtaccaagccctcgaaacccttgcgatggacagtgttttagatgcggccaagctgaaccaatacactagctttattggtaatattatggcgtcgcggatctcatcgttatgggattttaatggcccagcctttacgatttcagcaggcgagcagtcggtaaatcgttgtattgatgtggcgcaaaacctattggctatggagtcacgtcaagagccgctagatgccgtgatcatcgcagcagttgatttatctggcagtattgaaaatatcgtcctgaaaacggcaagtctcgctaaaacaggtcaactacttccgctcagtattggtgaaggtgcgggtgcaatagtactgcaggttgccgaccaaacagccacagactctgagccactggatttaattcatcaagcacttggtgctgtggacacaccatctgcggcaatatcaggttcaacagaacgaatcagcagtgattcccttaacagccacggggcgttaaacagctacgctacaatcaacagtttatcatttggtcacattagccaacttgaagccatcagtgatgaattactcacccctgcgggcttatctacaagtgatatcggcaagctagagctaaaccaagctccagacttaacccatattgattcagcgcaagcgctatcacaactttatagtcagtcagcaacaactcaagccaaatcatgtatcggccatacttttgccgcttcaggaatggcaagcttgctgcacggactgctcattcaaaaacaagatgcgcattcaaaccaaacggttcaacccttaaatacccttgtcgccacactcagtgagaaccagtgttcacagctactgatgagtcaaactgctgaacagatctcggctttaaacagtcgaattaatactgatattgggcagcaaaccgctaaaaaactgagccttgttaaacaagtgagcttaggtggacatgatatttatcagcatattgtcgatacgccactagctgacattgacaatattcgcgctaaaacggcaaatcttatccctgccgtaaccaatacaacgacgaacatgcttgagcgaggtcagtttgtgtctccacaactaactcctttagcaccaatgttcgacaagaataacgctatgacaacagagacttctatgccgttttcagatcgttctacccagtttaatccagctcctaaagctgcagcgcttaatgccaaagatagtgccaaagctaatgccaacgttaaagctaacgtgacgacagcaaacgtaacaacagcaaaccaagtgccaccagcacatttaacggctttcgagcaaaatcaatggttagcccataaagcgcaattagcatttttaaacagccgtgagcaaggcttaaaagtcgctgatgcgcttttaaagcagcaggtagcacaagcaaatggtcagccttatgttgcccaaccgattgcacaacctactgcagctgtacaagcagcaaatgtgttagccgagcctgtagcatctgctccaatcttgcgtccggatcatgcaaatgtgccaccttacacagcgccgactcctgctgataagccatgtatttggaattacgctgatttagttgaatacgctgaaggcgatatcgctaaggtattcggccctgattacgctgtgattgataactactcgcgccgtgttcgcctaccgaccactgattatttgctggtatctcgcgtgactaaactcgatgcgaccatgaatcaatataagccgtgcagcatgacaacagagtacgacatccctgaagatgcgccgtaccttgtcgatggtcaaattccatgggcggtcgccgttgaatcaggccaatgtgatttaatgttgatcagctacttagggattgattttgaaaacaaaggtgaacgtgtttatcgcttacttgactgtaccttaaccttcttagatgacttaccacgcggcggtgacacactgcgctacgacatcaagattaataacttcgctaagaatggcgacaccttactattcttcttctcgtatgagtgttttgttggcgacaagatgattctgaaaatggacggcggttgtgcaggcttctttaccgaccaagaattggatgacggtaaaggcgttattcgcaccgacgatgagattaagctgcgtgaaactgcgctaaacaatcctaataagcctcgctttgagccattattgcattgcgcccaaactgagtttgattatggtcaaattcatcatttgttaaatgcagatataggtggctgtttcgcgggcgagcatcacaaccatcaacaagcttcaggtaagcaagattcactgtgttttgcttctgaaaagttcttgatgattgagcaagtaggcaaccttgatgttcatggcggcgcatggggcttaggctttattgaaggtcataagcaactggcacctgatcattggtatttcccatgtcactttaaaggtgaccaagtcatggcggggtcattaatggctgaaggttgtggtcaattactgcaattctttatgctgcacattggtatgcacacgctcgttgaaaatggccgtttccaaccacttgaaaatgcttcacaaaaagtgcgttgtcgtggtcaagttctgccgcagcacggtgaactgacttaccggatggaaatcactgaaattggcattcaccctcgcccatatgccaaagcgaatattgatattttgcttaacggtaaagcggttgtcgacttccaaaacttaggtgtcatgatcaaagaagaaagcgaatgtacgcgctaccttaatgatacgcccgctgtcgatgcctcagctgatcgaattaattcagcaaccaataatattctatacccagcggcttcaaccaatgcgccactcatggctcaactgcctgatttgaatgccccaacgaataaaggcgttatcccactgcaacatgttgaagcgccgataattccagattatccaaatcgtactcctgataccctgccattcacggcgtatcacatgttcgaatttgccactggcaatattgaaaactgctttggaccggactttagtatttaccgtggtttcattccaccgcgcacaccatgtggcgacttacagctaacgactcgtattgttgatattcaaggtaaacgtggcgaattgaaaaagccatcatcgtgtatcgcagaatatgaagtgccaactgatgcatggtatttcgctaaaaacagccacgcctcggtcataccttattcagtgttgatggaaatttcactgcaacctaacggctttatttcaggctacatgggcaccacattagggttccctggtgaagagttattcttccgtaacttagacggtagtggtgaactattacgtgatgttgatttacgtggcaaaaccatcgttaatgattcaaagctattatcaaccgttattgctggtagcaacatcattcaaagcttcacatttgatttaagtgttgacggcgagcccttctacaaaggcagtgcggtatttggctactttaaaggcgatgcgcttaaaaaccagttaggtattgataacggccgtatcactcaaccatggcatgttgaaaataacgtccctgctgatatcactgttgatttacttgataagcaatctcgcgtgttccatgctcccgctaatcaaccacattatcgcttagctggcggtcaacttaactttatcgacaaagctgaaatagttgataaaggcggtaaaaatggcttaggttacttgtcggcatctcgcaccattgacccaagtgattggttcttccaattccatttccatcaagatccagtgatgccaggttcattaggcgttgaagccattatcgagttaatgcaaacttacgccattagcaaagacctaggtaaaggtttcacaaacccgaaatttggccagattttatctgacatcaaatggaagtaccgtggccaaattaacccattgaataagcaaatgtcgttagatgtgcacatcagtgcagtcaaagatgaaaacggcaaacgcatcatcgtaggcgacgccaacctgagcaaagacgggttacgcatttacgaagtaaaagatatcgctatctgtatcgaagaggcataaaggaataataatgactattagcactcaaaacgaaaagctttctccatggccttggcaagttgcgccaagtgatgccagctttgacactgccactatcggtaataaattaaaagaactcactcaagcttgttatttagtgagtcaccctgaaaaaggcttaggtatttcgcaaaacgcacaagtaatgactgaaagcataaacagccaacaggatttacctgtcagtgcatttgcccctgctttaggcactcaaagcctaggcgacagtaacttccgccgcgttcacggtgttaaatacgcctattatgctggtgcgatggccaatggtatttcatctgaagagttagtgattgcattaggtcaagcaggcattttatgctcgttcggcgcagctggcttaattccatcacgcgttgaacaagccattaaccgcattcaaaccgcacttccaaatggcccgtacatgtttaacttaatccatagtccaagtgagccagcactagaacgtggcagtgttgagctgtttttaaaacataaagtgcgcacggtagaagcttctgcatttttaggcttaaccccgcaaattgtctattaccgcgctgcaggtttaagccgtgatgcccaaggtgaagtggtaattgccaacaaggttattgccaaagtgagccgcacagaagtggcgagtaagtttatgcaaccagctcctgctaaaatgctgcaaaaactggttgatgaaggcttaatcaccccagagcaaatggcgcttgcccaattagtgccaatggctgatgacgtgactgcagaagccgattctggcggtcatactgataaccgtccattagtgacgctattgccaacaattttggcacttaaagataaaatccaagccgagtaccaatacaaaacacctattcgtgtcggttgtggcggcggtgtcggcacccctgatgcagcacttgcaacctttaatatgggcgcagcttatattgtgacaggctcaattaaccaagcttgtgttgaagcgggtgccagtgaacacacgcgtaaactacttgctacgactgaaatggccgatgtcaccatggcgcctgctgctgatatgttcgagatgggcgttaagctacaagtagtaaaacgtggcaccttattcccaatgcgtgctaataaactttatgaaatttatacccgttatgagtcgattgaagccatcccagccgaagaacgtgaaaagcttgaaaaacaagtcttccgctcgacccttgatgatatttgggctggcactgtggcgcactttaatgaacgcgatccaaaacaaatcgagcgcgcagaaggtaaccctaagcgtaaaatggcgcttattttccgttggtacttaggtttatcaagccgttggtctaattctggtgaagctggccgtgagatggattatcaaatttgggccggtccagcactgggcgcgttcaacgaatgggcaaaaggcagctatttagatgattatacccagcgaaatgcggtagacttagcaaaacacttgatgcacggcgcagcttatcaagcgcgtgtaaacttacttaccgctcaaggtgtggcactgcctgttgaattacagcgttggagcccgcttgatcaggttaagtaagcctgccaagcgtcatcaagctaagtcatttggatataggtagcggtaatgagcgaaacacaaaaacttgatttttcagtggttaatggcacaacacttgagtcgttcaaccaacaaaaaaatctgattaaacgcatgctaaaaggcaacagcgcaacatgtgctgaatgtaacaagccactaacgctgcaattaccgcctaatactaaaaatgccaaacctgccgaaaaagcacctgggatatactgcgcaaaaggctgcacagatattgaactggatatggaagctgtggcacttttaaaataatacgatgaaataacccatagattatttcatcattaccatttaaaaaaggcatcgaaagatgcctttttattgcaattaattgaccactttatcaagtggcgacttacctaatcactcaccaaaataagttattcagaatagtgaatttagaattgagagtttagggaatgctgttactgatacggttcaaattaggtaattaaaatatacttcattgcttcacggttcctgcacggtttctgcactttaatcacataacattaaaaactcataatagccattatcaactacgggttaacttaggagtttacttatgttcagtccccttctctattcgctttttcaaacgggatgtaaaccatttcggcaactattaattataccgcttactagcttatgcctattaactgcttgtgatagctcagatgataccagcagcgaagagactgtaataacagtacctgacactgaaattgaaacaccggttgaggagtataacgatactgattttgaagcaagcgattggaccgatgacacccatagcaaaagtgcagatgccaactttgatgaagtatttgctgacaatgaagtaaaacgccttgatgtggtggtcactgaagatcgctggaccatcatgcttaacgatatgactgatacttatggcacttttggtacaacgactaattcaaacaaccttgtagatacagatgacaaccccattatggtgccagctgatatttattacgaaggcaaacagtggtatcgagttggtatccgttttaagggaaactcgtcactgcaaaccagctggcaacaaggcgtactcaagttatcttttaagttagattttgatgagtttgaagactactacccacaaatcgacaatcaacgattttatggctttaaaaagttaagtcttaaaaataattacgatgatgagtcgcagttacgtgaaaaagttgccgccgatgtatttaaagatgcaggtttagccgtctctcacaccgctttttatactttatatatcgaccatggtgatggccctgaatactttggcttatatacccttgtggaagaagtcgatgacacggtaattgatactcaatttagcagtgatgatggtaacttatataagcctgaggatgatggtgcgacctttattgaaggatctttcagtgaagacagttttgaaaagaaaaccaatgaagatgatgaagattggtcagatattttagctttattcgacgcattacatgatgatacagcgacttccgatcctgttacttggcgtgaaaaccttgaagctatatttgatgttgatgtgttcttgaaatatctcgcagtgaatggcgtaattcaaaactgggatacttacggattaatgccccataattattatctttacaacgatccagacacaaacaaattaacttggatcccatgggataataatgaggcattacaaacgggtaaaatgggcggtgcattagaacttaatttctctgatttagactcaaattcttggccattgatagccaaaatctatgctgatgacacataccgggaacgctataaccagtatttatctgacgttattagcgatagctatgaaaccaataaaatgcaggcaatttatgacagttactcagcattaatagagccttatgccacaacagagttaacaggttactcatttttagagtctgcaaatgacttttatcaagcagttgatgatttatctgaacatgctgaaagtcgaacagacgccgtaatcgattacttaaacacgcaataggttgtagattttttctgtcattttgcagatacaatgaaaacgaaagcagcactggctactttcgtttttgttgctatcaattcaaaaccgtttactagcgcacactttcttattaaaaaataacaccttaacaagtcattgacctaaatcaaacataatgtgaaaaagctaaggcactatgcctctttattttttagtttggttatttccaatgagtgatatcaaggcaaacaatatagagcaaccgctgacggacgagtgcattttactttctaccactgatttgaatggtaatatcaaatacgccaatcaagcctttgcagatatctctgagttcacgacagatgaactccacggaaaaccacacaatattgttcgtcaccctgatatgcctaaagcagcttttgaatccttgtggcaacgggtcaaagacggaaaaccttggtttggtatcgttaaaaataaaagcaaaacaggcaagtattattgggttaatgcctatatatcgccagtctttgaaaacggcaaaatgcatgaactacagtctgttcgacgtaaaccttgtcgtgaacacatcaattccgctgaaaaaatttacaaacagttaaatcaaggtaaagcccccagagaaaccacagcaccactgcttagctttacgggttcactttgcctttgggcaaccgttatttctttgataggggtagtgtcttcgctcttcatgccaactttggtcgccgcttttttcattcccttaatggctggatttgtcatgtattacttaacgaggccgttaaaagaacttgaaaataaggccacaaaaattatcgacgacccaattgcttgcgggattttttcatcgagtcaacatgagttgggcaaaattgaattagccttaaactacttagtcactgaaatgggtggtgttgtcggcaggatggcagattcagccacctccattagcgaagaaagccagcaacttaatcaaactatatcgaccactcgtgaacgggttaaagaacaaacacaccaaacccgtcaggccgcaacagcaatggagcaaatgacggcaagcttcactgaagttaatcaaaatacccgcaatacagcacaagaaattaccaccagccaagaggctgctagtaaaggtcacgatagtatggacaaagtagtcaatgcaattggcgagcttagaaaagaagtggttcatttctcaacggtggtcaatacaattgaaaaagacagccaatcaatcgcatcggtcctaggagagattaaaggcatcgcagaacaaactaatttattagcgttaaatgctgccattgaagcggctcgagcaggtgaaactggccgtgggtttgccgttgtggcggacgaagtaaggcaattatcaattcgcaccagtgattccacatcagaaattgaacacatagtcacgaactttcaaaaaaccacaaaggaagcgactcaagcaatggagtctggtcagttgcaagccgatttatcagtatccttagcagaagaagcggatgacacctttgctcagctccttaactcaattaatcgcatacacgaaatggctgagcttaactcttcagccatgaaccaacaaacagcggtcgcagaagaaattagccaatctattttacagatagatgagatttcaaacctgaccttaattcaaaccgatgacacccaaaacaagtgtgaacaaatgagccgattagccaataaaactcgtcatttatcgagacaattttggacgcaaacaatcgaacgcaccaaataaatacctccaatattacccaaagcgtcataacctacatgttgattatgacgcaatcttgctcaacactgattaacttccccatgtttgcagataacgcgagatttagcggctgattgactattgccccctctttctgattgtcattttttcctgttgtgacagtttattttttgataagactttttaatttaaaaaatgccctaatatcatatatacagttaacgttaagccatgcttataaagccgtttaaagcgattcaaagtgagggtacacaatgacaaacgaatttattccacctaaaaaatgggtaatggaagaggaaaatggcggcaagtttgccagtataaaccgtcctgactctggtgcgcgctatgataaagatttaccggttgggaagcatgcactgcagctttactctatgggcaccccaaacggccaaaaagtcacgattatgttggaagagctgttagccgcagggatcactgacgcagaatatgatgctcacttgattagcattggtgatagcgatcaattctcatcaggttttgttagcgttaatccaaattcaaaaataccggcattattagataacagtacctcaacgcctattaatgtatttgagtcaggcgctattttactttacctcgctgaaaaatttggctgcttcttaccaacagatttagctgctaaaacccaagtcatgaattggttgttttggctgcagggctcggctccttatttaggtggcggttttggtcacttttatgcttacgcccctgaaaagtttaaataccctatcgacaggttctctatggaggccaagcgtcaacttgatgtacttgacaagcaattagctaaacaccgcttcttgggtggtgatgagtatagtattgccgatattgcgacatggccttggtacggaaatttggtgcttggaaacctatatgaagcagcagagtttttagatgttgaaagctaccctaacctaatgcgctgggcaaaagacattgaacaacgtccagctgtcgcgcgtggcagaatcattaatcgaacctggggggaagagtgggaacaactagcgaatcgtcatagcgccgaagatattgataatgtgcttaaacgtcagccataacactcacaatttctcaatccattggtagatcactcaattttgataatgtgagcctttacctttgatgtgattcactctcattgggaatgaagtttgataaagcggtaggcacaccatcaagtgcttatcgcattattgctaaccaacaacccctttaccgattaaccactttcaagcttgttccaacaacataagcacgtcggctgtacgtctggcggtaaagtaatgataaaaccacaatgcgggcaaaaatccccaatatttaaacggacataagattgtgtttgcttatacatcagcatcgctcttcttttcgattatattgaggtgaatacatcgccattagctgtgcttctacagcaccccttacacaaacaggctcaccatttagcggactaggtacagttacgttagtcgcaatccatagctccatatcacgtattaactcctctttaactaacctgccagccgtaccatgtgaccaaatacgttttccaagtagaccactctcgccgacatataaaacctgatctcctttcttgaaaaaatacacccccgaaatgtctcttggtaacagagaaaaccagtgctttcttgttgcatactcattaccctcaaagtcatataagccataagtttcgctattacgattaacaagccatgcttgagatcaactgatattagcgatatgagtaaatgtaatactgcccattttaaaggtattcatctacgacctcagcgcagttaaacccctggtacatctggccatcaggcctcaacttcgaacttgttacagcattatcactaacaaacttggtataaattgtatctactcttttaacaggcttaccaaataacactcgagtatttcctccgatagcagataccagtcgactacctagcatctgatgttcttcagtttctatctcatctaatatggccacaacttgataagccactggaattttacggtttgcattgatgacataaacccaatctccttttgagattgaacaaaagtcatcccagccatgttggccaggtgctaaatcgaaaaaagcattgttaccaagcgatgcatatatttttcggtgtggacgatcagctatatttgatacaagaaattttcgcataatgaacaaaggcacttaatacacatgtgtatatactaattaagtttccctacaaagtaaaccgtactaagtacctttattgtttatttcaatatagatcatattcaaataacgctaatcataacgacttttttattgatttcattgaattttaggcgcaaagttaactatgtaaaccagctaattagaacgcttaaagagtaaaaagcgcacactagcaacacagataaaagcaaaattgcgccagtactatcagcaccttcatatgaggtaaatatgaacaagctactaatacttagagcagtgacgaggatttatgacaccttcaacctctgcaaaagcacccactttaataccagccaactaaacttgttagcgacagcgaatcacctcatcgctgcatgctttaacagcaaaagtccagctaacgctaaaatcaaatcagcaagtatcatcatttgttacttatttaacggcattgtttttagcgtacatgcaacggatgagcaccttaacagtacaaggcatcttcaaacgatttccccgcttaaaaccgctttgcatttggagacttatttaggcggacatagtacaaatttagctaacaaagccgcactttcgtttgagttcggccagagaaatagtcagcatgtttgccatataaccacaacagaagagcatttaatgcaatccaataatttactggaaaacattaatttaagtgaaaaacatttcttctttgactgtcaaattgataatgatttttatgtattatctaaccaataccgtacttatgcccaagtgataattaagcaacctgacatcaactttccaatgtcgatgcatatagaggcgaaacttgtcacaattgatggcaagctgctcaatgtcaccagtggtgatatctcacttaaacggaaatagctcacatggaatttgacacaataagagattatttactgactaaaccttttgctacagaagactttccattcggagaatctactcacgtttttaaagttcactcgaagatgtttgcactaatgtcatggcgaaatgatgctttgatggttaatgtaaagtgcgatcctgaagactcattcgccctaagagagatatttagcaatattacgacgggatatcatatggacaagaaacattggatttctatctatttacagtcaactgggagtgataaatctaaagaatctcgattaattccagatggtgaggtattgcgcattattgataattcatacctattagtcgtcgacaaacttcctaagaagcaacaaacagccatcaaactgcatttataacaaacaaatcaaagcgctttatagggtttgagcaagactatttttcagaaagcagagctgtgtgcactattttttcgatagtattgtcttgctcacctaagaactgacaaccaaactcgacaccattttcgaataatttaacattacacactctggctttaatggtgaggttttcttgttctgtagcctctatcacgatttcaatctgctctccctctgttaactcatcttttccaccttcactaacttcaatatgacaacctgaaagtgaaacatcggtgattttaacttgccattggttatcacctaaagcgatattggcggttaaatctgtcaacacacgtttggtcgaacgtaaattgtgaataaccatattatctgggaaattcaataccataatacgagatggctgactcaaggtttgtttgattgttgaaataaatgcgattacagatgcctcatgaccttccactaaaccacgaacagtcacttgtgagccctgagtaatgtactggctgtagcctcccaatttatttgcatctggaaattgaattagtatgaattgttcaggtagataaccgataaaaatggtacgaaaacgcccttttttacctgcaggagtcacaatatcaatattgacaggcgtaccagccaataagtatttaaattctttagacaaaccctctttagtattgatttgttttgtggtcattttaccttccctgaaccttttatttcccaatcaaagattagcacaagatttaacatacacaacagtgagttaaccttaattaaatgttattcatgtgcttgcacctcttgtatctagaggtctatggtgaatatcacaaggttaaggtttttgatgtaaaacataaaagacattgcaccaaacctgaatattgacggtcgtcagattcagtcgcctcagccgttgacataaggtaacggagttaacatatgagaaatctagaattattcagcacagcatctatcgatcacttactttggtctaccagcactgactcacccagcttagactctccagcgttagacgtatttactgattttgatgtagcacgtcctattgtcgttgatgcatccaccagcgcagtggccacagcaataatcatggaacaaacccatgcatttatgagattagttgttgataagaataataaatttttaggggtgataacgctgcaagaattgtctgaccataatttatttgttaccgcgaaaaagctagaccttactgtagatgagcttttagtcacagaagtgatggtgccaagagaagagctacaagcgtttgactatcaacaaatttcaacagccaaagtcagtgatatagtcaggcttttgcaacaaaataatttgcaccacatgctagtcatcgatcatgaattgcatcatatccgagggctgattgcagcgagtgacttagccagaaaactcaatatgccaatagaaatacatcaacggccttctttcagccaaattttctctaatgcccattaatgattttgcctaaacgatataaatcacggagccacttacctgacaaatctcaggtaagtgacgataaaccttattgaatatacgcagaaactagccttgctgtgttagttggctttcttgttcaacaagctgattatcgaaagcaacacactgatttttaccataagtcttagcttgatatagggccaaatccgctttttgaataatctctttcgctgaggtgaagttgctaggtatgcaagaagtaaaacctaaactcaaggtgacgattttactttttgatcttgggtgcgggatgccgagttcggcaattttcaaacgaatatcttcagcgagttgcgacacactttcttgctgtccgtaacaaataatagcaaactcttcaccgccataacggcataccacatcggttgaacgcacacatacctcagctattgcttgcgatacttgtattaagcattgatctccttggtagtggcctaagaaatcgttataagctttaaaacaatcaatatcacacatgattaatgacactaattgtcgctctcttcgtgctagattgataataaagtccaattgagaatcgaactctctgcgattgttcagccctgttaatgcatcaagctttgaaagcttaaacaatttagcactcgtacgttcacgctcaataatcccaaaaagtaattgtgcatttccgcaatcgtctcgaagtattgctctcgctttactcgtaaagtaaaggatctcaccttggttagcgtcataataaggaaaacgattatggtattcatcgatacgtcctaagcgcaagtcacagtaatcttcaaaaattcgcttagctttatgggcatcttttaccgcaatatttttattgtaatccccagcgataggacaagtcttactaacagaatgttgaagggtatttgagtctaaagagaacatgtcacgcatgttactgttgcagtaaaaaacattactattatcttctaagtctattagccaccaggaaacacctgaaaagcttaataactcttgataaagcgtataatatttttcaattcgcttatttggaaacgtcataattgattagccactttgttcaagctaaccattagtcacttacgcaactaactttccctttagcaaaatgaatcagcaaaactactatgattatagaccctgtttacgtaatttcctgtttgcctctcatttagctcaaaacaatgtcgttaataaatgccgctaataaatgcattaaaccgctgtccacctatgttcgatacacggctttatttgggatacttgctcagctaactgctcttgtgatgaataatcgacattggcccaaagcttaatctcaaacaccgcccctaaagcaacctggccaacgcctttaggtgtacctgtcatcacaatgtcgccatccactaacgtcataaattcattcaccgaagctagaatatcgtcagcactgtacatcattaaatcgctatgaccgagttgcctgacttcaccatcgattgtcaattgaaagcaaaatgtagctccggcagttaacgacaatgaagataaactgacaaaatcactaaatagagccgagccgtcaaatgccttagctcgctcccatggtagctgttgtgatttaagtttggactgcaattctctcttggttaggtctaatcccacccctaccccatgaaacatcccattacgcactgaaaaacatagctctgtttcaaaatgaatcggctcttgatgaaatgagatcagctgcgtggaaatcgcagagttaggttttaaaaaaaccaccatatctgaaggcacctcattacccagctcatggatatgatc

SEQ ID NO: 70 - protein, 2787 aa, Sh. japonica
MSQAPTNPETSSQDNNESQDTRLNKRLKDMPIAIVGMASIFANSRYLNKFWDLISEKIDAITEVPDTHWRAEDYFDADKSTPDKSYCKRGGFIPEVDFNPMEFGLPPNILELTDTSQLLSLVIAKEVLADAGVTSEYDTDKIGITLGVGGGQKINASLTARLQYPVLKKVFKSSGLSDADSDMLIKKFQDQYIHWEENSFPGSLGNVIAGRIANRFDLGGMNCVVDAACAGSLAAMRMALTELVEGRSEMMITGGVCTDNSPSMYMSFSKTPAFTTNETIQPFDIDSKGMMIGEGIGMVALKRLEDAERDGDRIYSVIKGVGASSDGKFKSIYAPRPEGQAKALKRAYDDAGFAPETVGLIEAHGTGTAAGDVAEFNGLKSVFGENDSTKQHIALGSVKSQVGHTKSTAGTAGVIKAALALHHKVLPPTINVSKPNPKLNVEDSPFFINTETRPWMPRPDGTPRRAGISSFGFGGTNFHLVLEEYSPEHSRDEKYRQRQVAQSLLISADNKAELIAEINKLNADISALKGTDNSSIEQAELARIAKLYAVRTLDTSAARLGLVVSSLNELTTQLGLALKQLSNDAEAWQLPSGTSYRSSALITINANQKTTKGKKAANTPKVAALFAGQGSQYVNMGIDVACHFPEMRQQLIKADKVFASFDKTPLSQVMFPIPAFEKADKDAQAALLTSTDNAQSAIGVMSMSQYQLFTQSGFSADMFAGHSFGELSALCAAGVISNDDYYQLSYARGASMAASAVDKDGNELDKGTMYAIILPANENDAANSDNIAKLESCISEFEGVKVANYNSATQLVIAGPTQSCADAAKAIAALGFKAIALPVSGAFHTPLVGHAQKPFAKAIDKAKFTASKVDLFSNATGDKHPSDAKSIKAAFKQHMLQSVRFTDQLNNMYDAGARVFVEFGPKNILQKLVEATLGNKAEAVSVISINPNPKGNSDVQLRVAAMQLSVLGAPLSSIDPYQAEIAAPAVPKGMNVKLNATNHISAPTRAKMEKSLATGQVTSQVVETIVEKVIEKPVEKVVEKIVEKEVIKTEYVEVATSGATTVSNVAPQAIAPHASAQAAPASGSLEAFFNAQQQAADLHQQFLAIPQQYGDTFTHLMAEQSKMVAAGQAIPESLQRSIELFHQHQAQTLQSHTLFLEQQAQASQNALNMLTGQTPVTAPVVNAPIVNSPVVEAVKVAPPVQTPVVNTPVVPAVKATPVAQPAAMAAPTPPVEPIKAPAPVAAPVVSAPVVPTPAGLSAQTALSSQKVLDTMLEVVAEKTGYPTEMLELSMDMEADLGIDSIKRVEILGTVQDELPTLPELSPEDLAECRTLGEIVDYMGSKLPAAGAMNSDTANATHTAVSAPAASGLSAETVLNTMLEVVAEKTGYPTEMLELSMDMEADLGIDSIKRVEILGTVQDELPTPPELSPEDLAECRTLGEIVSYMGSKLPAAGAMNSKLPASAAEVAQPQTAPVQAASGLSAETVLNTMLEVVAEKTGYPTEMLELSMDMEADLGIDSIKRVEILGTVQDELPTLPELSPEDLAECRTLGEIVDYMNSKLPAAGSAPVASPVQSATPVSGLSAETVLNTMLEVVAEKTGYPTDMLELSMDMEADLGIDSIKRVEILGTVQDELPTLPELSPEDLAECRTLGEIVDYMGSKLPAAGAMNTKLPAEGANTQAAAGAAQVAATQTSGLSAEQVQSTMMTVVAEKTGYPTEMLELSMDMEADLGIDSIKRVEILGTVQDELPTLPELNPEDLAECRTLGEIVSYMGGKLPAAGAMNTKLPAEGANTQAAAGASQVAASTAETALSAEQVQSTMMTVVAEKTGYPTEMLELSMDMEADLGIDSIKRVEILGTVQDELPGLPELNPEDLAECRTLGEIVSYMGAKLPAAGAMNKKQASVETQSAPAAELATDLPPHQEVALKKLPAADKLVDGFSKDACIVINDDGHNAGVLAEKLVATGLTVAVIRSPESVTSAQSPLSSDIASFTLSAVNDDAISDVIAQISKQHKIAGFVHLQPQLTAQGALPLSDAGFVAVEQAFLMAKHLQKPFAELAKTERVSFMTVSRIDGGFGYLNTAELAKAELNQAALSGLTKTLGHEWPTVFCRALDITPSFEAVELAQAVIAELFDVDTATAEVGISDQGRHTLSATATAQTRYQTTSLNSEDTVLVTGGAKGVTFECALTLAKQTQSHFILAGRSEHLAGNLPTWAKSVIAAAPNVSEVNTSQLKAAAIGFIQSQGNKPTPKQIDALVWPITSSLEIDRSLAAFKAVGASAEYISMDVSSDAAIKQSLAGVKPITGIIHGAGVLADKHIQDKTLAELGRVYGTKVSGFAGIINAIDASKLKLVAMFSSAAGFYGNTGQSDYSMSNEILNKTALQLAANYPQAKVMSFNWGPWDGGMVSSALKKMFVERGVYVIPLDKGANLFAHSLLSESGVQLLIGSSMQGSSSADKTGAAVKKLNADSSLNAEGSLILSFTTPANRVVNNAVTVERVLNPVAMPFLEDHCIAGNPVLPTVCAIQWMRETAQQLCGLPVTVQDYKLLKGIIFETKEPQVLTLTLTQTESGLKALIASRMHRDPMDSLLRPQYQANLVINEAVINGQTLTTQPTIVADAQQLASAGKVISTDSELYSNGSLFHGPRLQGIKQVLIADDTQLVCNVELPHISSADCAGFAPNLSIGGSQAFAEDLLLQAMLVWARINHDAASLPSTIGKLTTYSPFASGDKGYLVLSVLKSTSRSLTADIALYHQDGRLSCTMSSAKTTISKSLNEAFLAPAKAIADLQESV

SEQ ID NO: 71 - protein, 759 aa, Sh. japonica
VSTQLTAKTAAINSIRIALKLVANDQTSFAPAQNADDIFSAIKPCSLAQVIGESAIDLEIDVSSLDAGIDNLATASQQTLSFSDYFAQAIAHIEQQHTVLLSHPAIPYRVLMMPAIVAAKHRCHPHAYLTGLGEADDMQCAMQNALAQAKREHITPTLVDVTELTCYKDKFTQLVMLISRIAARRLPDTTLPTVTSDKQNNSNQANAKYWFTQMHQNRVASFNFTENGKQHAAVFVQGTELAQASSMLDENRLFFPLAANTSACMIQSLHELLVALNRLNQQQSNPLDSQRLLNKPSHVISLMLNYLKAFDQTKSLSAVIIANSVVTAIAEIEAMLAKISTASDDTSGSINELEYKTPSGSCLTITHHEALGRSGVCFVYPGVGTVYPQMFAQLPQYFPALFAQLERDGDVKAMLQADCIYAENAKTSDMNLGELAIAGVGASYILTKVLTEHFAIKPDFAMGYSMGEASMWASLNVWKTPHNMIEATQTNSIFTSDISGRLDCVRQAWQLEQGEDIVWNSFVVRAAPTEIEAVLADYPRAYLAIIQGDTCVLAGCEQSCKALLKQIGKRGIAANRVTAMHTQPAMLIRDNVQAFYQQALHDQDVLDAQASSIKFISAASQIPISLTSQDIANSIADTFCQPLNFTKLVNNARHLGARLFVEIGADRQTSTLIDKIARTAANTDSHLNAPLSAIAINAKGDDQTALLKCIAQLISHKVPLSLQYLTENLSHLLTASITRENRQQSQTAQLAPQLEGEQS

SEQ ID NO: 72 - protein, 2019 aa, Sh. japonica
LSSQSNVPKIAIVGLATQYPDADTPAKFWQNLLDKKDSRSTISQQKLNANPADFQGVQGQSDRFYCDKGGYIQDFSFDANGYRIPAAQFNGLDDSFLWATDTARKALNDAGVDITNSQDNAILNRTGIVMGTLSFPTAKSNELFVPIYHSAVEKALQDKLQQPSFTLQPFDSEGYSKQTTPASLSNGAIAHNASKLVADALGLGAAQLSLDAACASSVYSLKLACDYLHTGKADMMLAGAVSGADPFFINMGFSIFHAYPDHGISAPFDSNSKGLFAGEGAGVLVLKRLEDAERDGDHIYALVSGIGLSNDGKGQFVLSPNSDGQVKAFERAYADAAMHDEHFGPDNIEVIECHATGTPLGDKVELTSMERFFNDKLNGSHTPLIGSAKSNLGHLLTAAGMPGIMKMIFAMRQGMLPPSINISSPITSPNQMFGPATLPNDVLPWPDKAGNRARHAGVSVFGFGGCNAHLLIESYHGQTSTAPAANTINAQLPMHITGMASHFGPLNNINRFANAINQQQTAFTPLPAKRWKGLDKHPELLQQLGLAQTPPTGAYIDQFDFDFLRFKVPPNEDDRLISQQLLLMKVADEAIHDAKLASGSKVAVLVAMETELELHQFRGRVNLHTQIAASLNAHGVSLSDDEYQALETLAMDSVLDAAKLNQYTSFIGNIMASRISSLWDFNGPAFTISAGEQSVNRCIDVAQNLLAMESRQEPLDAVIIAAVDLSGSIENIVLKTASLAKTGQLLPLSIGEGAGAIVLQVADQTATDSEPLDLIHQALGAVDTPSAAISGSTERISSDSLNSHGALNSYATINSLSFGHISQLEAISDELLTPAGLSTSDIGKLELNQAPDLTHIDSAQALSQLYSQSATTQAKSCIGHTFAASGMASLLHGLLIQKQDAHSNQTVQPLNTLVATLSENQCSQLLMSQTAEQISALNSRINTDIGQQTAKKLSLVKQVSLGGHDIYQHIVDTPLADIDNIRAKTANLIPAVTNTTTNMLERGQFVSPQLTPLAPMFDKNNAMTTETSMPFSDRSTQFNPAPKAAALNAKDSAKANANVKANVTTANVTTANQVPPAHLTAFEQNQWLAHKAQLAFLNSREQGLKVADALLKQQVAQANGQPYVAQPIAQPTAAVQAANVLAEPVASAPILRPDHANVPPYTAPTPADKPCIWNYADLVEYAEGDIAKVFGPDYAVIDNYSRRVRLPTTDYLLVSRVTKLDATMNQYKPCSMTTEYDIPEDAPYLVDGQIPWAVAVESGQCDLMLISYLGIDFENKGERVYRLLDCTLTFLDDLPRGGDTLRYDIKINNFAKNGDTLLFFFSYECFVGDKMILKMDGGCAGFFTDQELDDGKGVIRTDDEIKLRETALNNPNKPRFEPLLHCAQTEFDYGQIHHLLNADIGGCFAGEHHNHQQASGKQDSLCFASEKFLMIEQVGNLDVHGGAWGLGFIEGHKQLAPDHWYFPCHFKGDQVMAGSLMAEGCGQLLQFFMLHIGMHTLVENGRFQPLENASQKVRCRGQVLPQHGELTYRMEITEIGIHPRPYAKANIDILLNGKAVVDFQNLGVMIKEESECTRYLNDTPAVDASADRINSATNNILYPAASTNAPLMAQLPDLNAPTNKGVIPLQHVEAPIIPDYPNRTPDTLPFTAYHMFEFATGNIENCFGPDFSIYRGFIPPRTPCGDLQLTTRIVDIQGKRGELKKPSSCIAEYEVPTDAWYFAKNSHASVIPYSVLMEISLQPNGFISGYMGTTLGFPGEELFFRNLDGSGELLRDVDLRGKTIVNDSKLLSTVIAGSNIIQSFTFDLSVDGEPFYKGSAVFGYFKGDALKNQLGIDNGRITQPWHVENNVPADITVDLLDKQSRVFHAPANQPHYRLAGGQLNFIDKAEIVDKGGKNGLGYLSASRTIDPSDWFFQFHFHQDPVMPGSLGVEAIIELMQTYAISKDLGKGFTNPKFGQILSDIKWKYRGQINPLNKQMSLDVHISAVKDENGKRIIVGDANLSKDGLRIYEVKDIAICIEEA

SEQ ID NO: 73 - protein, 542 aa, Sh. japonica
MTISTQNEKLSPWPWQVAPSDASFDTATIGNKLKELTQACYLVSHPEKGLGISQNAQVMTESINSQQDLPVSAFAPALGTQSLGDSNFRRVHGVKYAYYAGAMANGISSEELVIALGQAGILCSFGAAGLIPSRVEQAINRIQTALPNGPYMFNLIHSPSEPALERGSVELFLKHKVRTVEASAFLGLTPQIVYYRAAGLSRDAQGEVVIANKVIAKVSRTEVASKFMQPAPAKMLQKLVDEGLITPEQMALAQLVPMADDVTAEADSGGHTDNRPLVTLLPTILALKDKIQAEYQYKTPIRVGCGGGVGTPDAALATFNMGAAYIVTGSINQACVEAGASEHTRKLLATTEMADVTMAPAADMFEMGVKLQVVKRGTLFPMRANKLYEIYTRYESIEAIPAEEREKLEKQVFRSTLDDIWAGTVAHFNERDPKQIERAEGNPKRKMALIFRWYLGLSSRWSNSGEAGREMDYQIWAGPALGAFNEWAKGSYLDDYTQRNAVDLAKHLMHGAAYQARVNLLTAQGVALPVELQRWSPLDQVK

SEQ ID NO: 74 - protein, 303 aa, Sh. japonica
MSYCYYKCEFGLSPLPTIQLFFCPLDTNLLDEKTVSTVRSWLSDAEINKVDRFIQQAAQQQGLMVRGYLRSVLSNFANIEPDDWQFEYGEKGKPRLSAVQYKQTGLQFNLSHSGNWLLIGVIHSKEDASMPIQLGVDIERRRESTNIHSILHHYFSKPEETALLALPESQQRERFFDLWALKESYIKAKGLGLALSLKSFAFDLSAPSLANLTIDDQLLPIQHDISLSLLKPTDVDELEQTNDVESFYEVSPLWQCCLGKLNNSYRFAVSVGEFAFGEKPLTLQLKAKKISWHEQIKMFIKTN

SEQ ID NO: 75 - DNA, 38794 bp, Sh. olleyana
gatccagtgttattcaaccaaattgaagcattgaatactccttatccttttccaattcaaggccatgctcaattcgccatcgtgttttggcgagaagatgagataccgtttatttggtttttaaagcttccgcttgatgaacaagggttattgtctccagctcaacgtagccaattcatcaaaatgatcctcgaagccttaggccgagatcctaccaaagcgctttctgatgaagaacaagagcgttatgctaatcatccgttcagcttcaaaccgagtcaggagaagctagccttatttaacgcattagtaaaaaaacagttaagccaacaagcctcggcgcagtacgaatatgctgctcagtactttgaaaatttgaatgaaaaaaacgctcaagatgacagctggcagcaactgggtttacaaggcatcgccgatgtctgtgtccgcttagataagtttgaccatgataagcatattaatacggcaatgaagcttgctcccttagaagtacaagccgcaatttgccaatgtttagaacatgttgctgtttcaaatacattagctgaaaccttatacgataatttgtcatctgctgaagtggaacataaacatatctaccttcgcgctcttgcttcacagcctgaattgactcaaaaagcgattcagcaactggttaatttacagcaactcgatgagaatttattaatcactattgcagcaagaagttggacggctttaaaagatgatgcaactcgcaaactttatcttgaagtcttagctaaccaaccacaaaacttctttaatcaagtttttgctgatatcgtagctattccaagtctacggaactcactgctacttgatttaagaagtgctgatcgtagtgaaaaactttcttccgccatcggcggattatttagggccgttagccaatgatgtcagactttattttaatcgttgctgttgtggttgttgctgcattcttttggcagttacgccagatggctgaaatcagtcgccgatatgctgagagatcttgtgccaatcaaaaagtacaattactcgcgattgcgatggaatcagctagacctagtattggcggttcaacaggtttatgttggcgagcaaaatttatgtttgaattcagcaccgatggtattaaccaataccgcggtcatatcaacatgcacagcaaaaaaatagagaaaattaattggcctattttccctgagcccgaatggatggatgcgccaatggcaaaaggcaaattcggtggttgtggcggcgcatcgagctgtaactcaggtaagtgtcgttaagcctcaacaactgcctaatcagtgagtcattgtagagttaatgtcactcgtatttactcaaaatatagttacaacaaaactgattattatcgtaataaaataagcgctattaggagaaattcactcttaatggcgttttttattggctaagtgattttttgtacgattgttggaaaacacacaagtcaaaaaatacttcacgtatggttatatatttagcccaaaagaaagaccgcggcaataaattgtcgcggcctcttgtacttttgttaagccatccagctatatctgtgctccctgcaccatccatgcgtctaacttgctccgtgcgctatccttattctatccttgatgttccatgtacatttaagtactgtccttcttactcgattatcctttgaccgagcctgctcaaatccttaagcgtgtcctttaattcgtccgtggttttcttccatgacatccttgattcaatttactgcatccattgcaatcactgttttccttaacagctcaaatccattttattgatgtccaatttataaaatccatttaaccataaagtctttcatcatcttcgatgtcagtgtcatccataaacactatcgttttccttaacgacgctttatcgtccacttaattaatgtgccttagtcatcatcctgatgagcaacaacaataattaaggttcatcctgagcaagccagcacaataatctattgtaacgctctgttgtaacaatctcatgttacaaccacctgcaaaaatcctattcagctgcagtctgaattcaaactgctaaacacttcctgtgcttatttgcttccttgtgattaattttaatcgatatgtgagcaaataaatatgcacaaaacacacaattaacatcaacccaacaaacaagcttggcacccataaaattaaactatttaaatacagtaacttaaataaaaacacttcaacatcgttatggttaaagcgtttaatctcacaacttttgtgagatatatctcacaaagagtataggaaagacagaaggtaagtcttttggcctattcacacatttaacatttgttaggtaaaagtgcataaatattgatttgaactgaacataaaaaagcccgaccttataaataaggtcaggctcattttactctttgttagctatcctgctaaattgtgctccctgctccatccatgcgactatatgtgcttcctgctccatttatccatttcaactcaatttccttgtattgccccaaatagagcattacatgagttttcattcctttgaatcagtctatccatttgactgaaagtcttactcctagatataccatcctggtatttgcttcctgcaatccttcatcttcctgatgagggtcatccttgtttcagttaatcattaactgagcttatgcccattccttgagcgtgtccttgtttcatcctgaattggttgttactcacccagcatttactcgataaataactaaattcacttaagcagcaatattcacttaaaccaaatagttaattaactgttcttgtcttgcggctacttcctgtaactcactaagttaatatattgattgcttaatgagttcattgtaataaatggatgaaatagagataggtaaaaaacgagcagaaacaaaaacttcacaaacctgaaattcagaccaaaaactcaagcacttgttttatatccacaaattaataaaaaagtaagatattgagtatttgggctaaacgaatacctacatcaatgtgagataagtctcacaaacggaagtaacagttagcttgaataatttcccaacttaaactgtttttttaacatttgtgcaaacatcacccaatcagctaatagactataaaacgggtactcgaatgttgctggtcggtttttctcaaacacaaaatggccaacccacgcaaaaccatagccaatcacgggtaaaagccacaattgccaccactgctgattaatgagcgttataacaatcaatattatgattaatccacttccaacataatgcagccttctacaagtggcatcttgatgttgtgataaatagaaagggtaaaaagatttaaagtcttggtattttttttcgctcatcttatcgtctccacttatatattattgtttttgagaaagatgctaaacagaactgtagacaacatatggttcacaaaatgacagttttatttacttggataaatgagaatttcaccatcgacactgccaattgttaattcagacaaatgattaaagccttcacgagcaaataattctgcatgcttagggttattcacgaaaacaccgataccatcaagttctggctgctcatcacaccaacttaacactgcctggatcagcttagcgccattacctttactttgctcaattggcgataaagcaataaattgcaaaataccatactgcttactcggcaagctttctaagatactgtgctcttttttcatgagcgcttgggtcgagttccaaccggtacctaacaccattttcaaacgccaatgccaataacggctctcacctaatggcacttgatgagttatgacacaggcgactccaatgagcctttcaccatcgaaccagccaattaaaggttgttcttgttgccaaagttccgttaactcctcgcgaatagaggcacgtagtttctgctcgtaactagcttggttagtagtagcaagagcttcaataaagaaaggatcatcatggtaagcgttataaataattgatgcagccacgcgtaaatcttctgcagttaaataaacagctctgtgttcttctaacgtgttttgttccatgtttacactctttactaaaccaagttaatagttacaacttaacaagtttaaaacatattgcaattttaatgctgtcacctaggcttaaagatatctcgatagccaagtacacgataaattggggatgaaaatggatacaacttcagcaacacttgctcacttgtttgaacagctaggattggattcatcagatgctggaataagcgtttttctatcgcaacataccatcaaagcaagtacaaatttaactgaggctgacttttggaataatgctcaaagagcatttttagaagagagtttaaaagatgacgcccagtggtcagaactggtagaccaactggacgttttgttaaggcaatagccacaagcttttaataaggcaattgccaaaagcaaaggccactctttgaaacacattaaaaagtgacagtgcttaatagtttatttaaattttttgatacgcagtgtcaccccaacccactagcttattatcactaatgacaaccggcgtacactcatcttttgtggtcttgccgtcacctttactccattgagtacgataaaagagtacgtttacttcttttttcgggctttcggcgtctgcctgagtaacgtatgcctcactaaaatctgcagttcccattaatatagtgacttgatctctcgccatacccatagtgagttttgataaattggctctgttagtttgttgctgtgtttcccaataagaatcactatggttaccttcgctgccaccaacatgaaatacacaaccacttaatgtaaggctacttgcagccattaaaaatgctaaacccaattttgttttcatgatacttccttattattaaaatgattctcacgtaatttctactcaaactgcttttgagatacgttataatgttgtctattatcattaagctaaaaacatgccaaagtttatacttttgattttattgaatattatttaatgaacattaataagtaagtattttcactaatccatattgaggattttcaccaattatgagtccaatcgaacaagtcctcgctgcagcgaaaaccattgcattgaatggccatacaccgacgatggcattagttaaaggtaagctcggtggcaaagtgcccatgcctttgcttatccaagggttacaacaatttaaagctattccgaaagaccaatggcaaactctgcctgacttaggtgattcacttgaatcaaataagcctgcagccaacacagatacccaagccatagaacaaaagctactgactcaaatgcagcaaatgaaaaccgaatttgaaagcaaaatttcgttattagaacaacgtattgcccaacttgaaaacaaagcgtaaatacataaataactgtcgttagcgctgttaatcattggcacgattgactactagtacgattaaccactgcctaataacgctgacgcatcgcgcttataaccccaaagttaaacggaaccccatgtttgtcacagagctaagatttgaatgttttgcggataccacaatcaccgcagccgaaaaagccattaaccattacctcgaatctttgcgagccaacggccaagccttgggaagagaatttgccgtcgcatttaatgaaggtgagtttaaagttaggttattaatgccagaaaaaaccagtctatcgactcgtcataatagtccttggacgaaacaagcgttaaaccagctcaccgaagctaaattacttgcccctcgtgaaaagtttattggccaagatatcaactctgaagtcagtaattcagaaacacctagctggcaggtgctttatactagctacgttcatatgtgctcgcctataagaagtggcgataacttgttgcctattccgctttatcagatcccagccagctttaatggcgatcataaacgggttatccgctggcaaacagaatggcaagcttgtgatgaattacaaatggctgcagccacaaaagccgaatttgccgctttagaagagattacctcccataaaagtgacttattcagacgaggttgggacatacgcggtagagttgaattcatcactaagataccgacttactattatctataccgagtaggcggcgacagtttagctagtgaaaaagagcgtgcctgccctcgttgtggttctaaagaatggcgtttagatgaaccattactcgatatgttccatttcagatgtgagccttgccgcatagtatctaacatctcttgggatcatcaataagttgttatgaaatccaaataataaagccagacatttgtctggctttattataattaatcattcatcaactgattaaattaagacttcttacctttaatcaaatcagcccacatcattttcatgcgttgccaaatgcctgggtgcgcgacatagttatcttcaacaataggttcaacaggtggcatcacgcgcggggttaatccatcaataaactcagctaaactgtcagcgagtttatctttaggcttatcaccaggaatttcaatccacacactgccatcttcgttatcaacagtaatcatttgatcgccatcacctaatacgccaacaaaccaagtgggtgcttgtttgagctttttcttcataatcagatgaccaatcacattttgttgcaaagattcaaagtcttgctgattccaaacttgcaatagctcaccttctccccaagttgaatcaaaatataaaggcgcagaaaaatattcgccataaaacgcatttatatcttggtgcaacttaagctctaaagcatgttctacattactgaaatttgagctatttttacgtttaatcgctttccaaaaaaccgcatcatctgaatcaagatcatacttaccttcaatacaggcggatccttgcccaagtgggaaataacggggaaactcgcctaatacatcctgataagcttgaaaataacggctagaaaaatgatccaatgaagttgaacaagacacttaagatgctccaattttgggttataatataagtctattttgacacggaaacagactagatgacacacaatcacgatccctatagtgatgcagatgcacttaaaggactgactttaggtcaaacgacacaatatcaagcagaatatgatgcttcactgctacaaggggttcctcgtaaactcaatcgtgatgccatagcattaaccgattcgctcccttttcagggcgcagatatctggaccggctatgaattatcttggctaaatgccaaaggcaaaccaatggttgccattattgaagtttacctcgctatcgaaagtgataatttaatcgaatctaaatcgtttaaactgtatctcaacagctttaaccaaacacgttttgagtcagttgagcaggtacagcaaacattagtcactgacttaagccattgtgctaatggcgaagtgacagttaaagtgattgaacctaaacattttaatactcaacgtattgtcgaattaccaggtaattgtatcgacgaacttgatattgaagtggatgactacgagtttaatcctgactatctacaagacagtactgaagataaaaacgttgtcgaaacagtcacatctaacttattgaaatcaaactgtcttattacctctcagccagattggggtagtgtcatgatccgttatcaagggcctaaaattaatcatgagaagttgcttcgctacttgatttctttccgccaacataacgaattccatgagcagtgtgttgaacgtatatttactgacttaaaacgctactgtaactgcactaaactaacggtatatgcccgttatactcgacgtggcggtttagacattaatcctttcagaagtgattttgaacaaccacctgaaacccatcgtttagcaagacagtaatgggtttctaataataaaaagcctgcaattgcaggcttttatattgtttatagtcggcactaaaatttttacgcataatgcccaataatagccgctaaatcatctaccgtattggcaatatgatcaggtttaacatgccagctttctggctctgattggctataagctgctgcaacagaaatgaccttggcatcgctgcctaattctaattgcaaattacgggcaaattgtgcatccgcttcatgatccccgatgtacatcagtaagttactatttgcgtgacccagtattgattcaacacatttcaggccgccgaatgggtgtggtttttgattaccgttaggtacatcgtcatagccaataatcgctttaaacggtgcaccaatttcattgctattgagaacacggcgaatattattttgcgaattttgcgaacagatcccgtgatcaaaatgagaaaactgttcaacaacccccttaatgccgtcaaatagcatgacttctgtttcattcttttcttgaaactcagcccacatgcttccagcttgaagcatttcattttcagttaacccatagtaatcaacatagagttgctgccaatttttagcaccatgattagcttcatggtaattagcttcgcttagtaagtacttaggcaagttttcgccagttaaatgcggtgcaacgatagacagtattgctttggtgatatcaatatttttcggtacagaattgactagagttccatcataatcccaaagtattgcgtctaatttcattgcatcatctcattgtttaataaacggtattaaggagtacactgttggtgtaaaaagtggctcagatgaatctcgttaaatacctttaaattatgtaacgagaaatctggcgattaaaataagcttcatcgtgttaaaaaacaactgttatcacctcagtctgagctacctgttaagtttttactgctcgcgtcatcatcttaaaaaattggttaaaactgacttcatgagggttcagtgcatctcctgcaaatggaccatataataaggaaccgtataatatagcctcattgaggtttatagattaagagcaataacactactcatgccaaaaccaacctgtttaacggaattaaatcaagagtcgctcaatgactctcaagagcatcagcactttaaaatatttaaaccttatggatttttgagccagtttgttcctgaaacacgaaagaaaaagcacttacttgcagagctctcaaacttccccgaaaaaaccatggcgattggtcgcttagatcacgattccgaaggcttactcttgctcacaacagacggcatgatgagtcataaagtaagaagcaaaggcatagaaaaagagtattacgtgcaagtggatggcgatattaacgatgaggctgtatctctgttacaaaatggggttgaaattggcatcaatggcacaaaatatcttaccctgccttgtaaagcattcaagctaaacgcagagccaatgcttccctcacgcggtaaaaaaattcgcgatccaaggcatgggccaaccagttgggtatcgatcaccttatgtgaaggtaaaaatcgtcaaataagaaagatgacagcagcagtaggttttgcgaccttaaggctagtaagagtcagaattggcgatattcatattgatgccatgcaagcaggcgatgttatttctctgagcaattttgacgcggctattaatagcgataattaacggtcactttctagcaaatacaccttttccattgctgtttcaactaactcacgtaaccacttcgttgccgggtcttgttgattacgggtcggccaaatgctgtaaattgatatcaattggctttcgaacggtaaatccatcaaggttaaattaaaagtagattgatagtttttagcataggtatatggcgcaatgcagattgcatcagatttgctgactcccgataacatggtgagcaaagatgatttttcgccatacatatggcgttcaggtaaatgctctgtagaaataatctctgctactcgctgattatgtcgatgtaatcggtaaaacaaatgtttagccgtaaaatacgactgctcatcaataccatttttaaattgaggatggttcgccctcgcgacacaaacgagcttttcggtagcaatttgtttgctggaaaatgatgcttcgctcggcgccacaatatctaacgctaaatcaatatgctgtttttgaagcgcttgatataaattaccttcatcaataatcgcttcagtaaagatgatttcaacgcctttatcagccaccgatttttcaatatcggcctcaatcaaatcaataattgattcatttgcactgacatgaaaaacacgttttgattgctgcgggtcaaacactttaacgctattaatacactgctctatatcgattaaagatggtcctaaggtttggtgcaaatgttggcctattgcggtaagagcaatacctcgaccttgcctgacaaataactccgccccaacaagggttttaaagcggttaattgcattgctgacagaagattgggttagtgaaaggtgctctgctgcaagtgtaattgattgataatcacatacactacaaaataccctaacaagattaagatcgagcttatgcagctcttgttggctcctttcttgttgcagttgttctaattgcaattgccctaaaccttgcttcacttttaccaccttaatacgtcatttgaacaaatagatttccaatacaaatgctcattcaagtcattgattctcgcctaatacattcacacagtaaatgtattaactattcttagccatagttatctttgccaattttgttgttaacttatattcaacaacaataaatcctagaggcttacatgagaaaatcattacttggtttagcgattaccctaacgtttaccacccaagcttttgcagctcaacatgaacacgaccatatcactgttgattaccatggtaagcccgcaactcctatcactgctgaacataataagtcagtagcaaaaaccttaaactttgatgataaagccgcttttgagcgatttagcaaaaacaaaatcgcctcatttgatgaagctacagccaaaattctacgagcagaatttagctttattagtgaagagttaccggactctgtaaacccatcattatatcgtcaagcacagctgaatatggtgccaaacggactatataaagtcacaggtggtatctaccaagtccgtggtacagacttatctaacctaacccttatccgaggcaaaactggctggattgcttatgatgtattactcaccaaagaagcagcgcagcaatcgttaaagtttgcttttgctaacttaccagaaggtcaggatttacctgttgtcgcgatgatttactctcatagccatgccgaccactttggcggtgcccgtggagtgcaggaactatatcctgatgtgaaagtctatggttcaaacaatatcacctcagaaattgttgatgagaatgttcttgctggtaacgtgatgagccgccgcgcagcatatcaatatggcgccacactgggtaaacacgaccacggtattgtggatgcagcacttgccaaaggtttatcaaaaggtgaaatcacttacgttaaacccgactatgaacttaatcataaaggtaaatgggaaaccttaaccattgatggtcttgaaatggtatttatggatgcctctggcactgaagccgccagtgaaatgatcacctacattccgtcaatgaaagcgctatggtcaggtgaattaacttatgatggcatgcacaatgtatacaccttaagaggagctaaagtacgcgactctttaaaatggtctaaagacattaatgaaatgattaacgcctttggtgaagacgtaaacgtattatttgcctctcattcagcgccagtttggggcaataaagaggttaatcattaccttcgcatgcagcgtgataactatggtttagttcataaccagtcaatgcgtttagccaatgacggcatagttattcaagatattggcgacgctatcatggagaccatacctcaaaacgttcaagacgaatggtacaccaatggttatcacggcacctatagtcataatgccaaagctgtatacaacatgtacttaggctactttgacatgaatccagccaatttaaatccattaaccactaaagcagaagcaacaaaatttgttgaatatatgggcggtgcagataacgtggtgaaaaaatcaaaacatgattttagccaaggagagtatcgctttgttgccacagcacttaataaagtcgttatggcagatccacaacacgatgcagcccgagagttacttgcagacacctacgaacagctaggttatcaagctgaaggggctgggtggcgtaatatttatctcactggtgctcaagagttacgagtgggtattaagcctggcgcgccaaagtcggcctctgctgatgtgatcagcgaaatggacatgtcgaccttatttgatttcttagcagtaaaagtcgacagcattaaagctgcggcacttggtaacattaccttgaatgtagtgacacaagatggaagccaaaccaacaccttatttgttgagttaagtaacggtaacttaagcaatattgctgtcgagtctccaaaacaagctgatgcaactctgactgtaaataaagctgatgtggttggcatactattaggcaagacgaatatgaaagcgctgatgcaatcaggtgcggcgacaatggaaggtgacaaacaggctttcgctaaaatcgcttcgactctagtgcaatttaatcctgactttgaaatcgttccattaaagcatgctcattaattagggcttgttaaatgatgagagtctagtggctcagaataaacagttttaaaacgaaacagttttacctatcagttggtttgaaggcgtgatttacaacttcaagccaactgattttttttgctttcagctccggaggtaactcgtctgaatttgtagacgcacgacccacactcacagcaaaacgatacaaatcatcaagctttcctaaataacaatgccactgcggggcaatgacaaaatcctctaataaaccatcagagtcactcgcctttagtaagcttaacttgacattttgttggatggtgattgtctcactgttaacttgtagttcacccacacttgaggcagataaatcaaacgcaaaagattttagcgataaagctagacctaagcctttcgcttttatataagactccttaagcgcccataaatcaaaaaagcgttctctgtgtttatcttcagctaaagccagtaatgcactctcttctggttttgaaaaatagtgatttagaatcgaatgaatattcgttgtttcacgacggcgttcaatgtctacaccaagttctatatctgtttgttgttgagctgttccatatgtgtttgccaccccgattaacaaccagtcaccactgtgactcagattaaactgcaaaccagtttgcgcaaactgctccgccgttaacctcggcttgcccttctcaccatattcaaattgccattgctgcggctcaacactagcaaagcgcgataacacactgcgtaaatagcctcgcaccattaaaccttgttctctagatgattgctgaataaaacgatcaacctttttgacctcatcttcaggcagccatgaacgcacaatagacgcagtcgattcatctaataaatcagtattaaggggacagaaaaataattgaatgacggttggcggcttcaaactaggctcaggctaaattggcaatgtaccattgtcgcttgttttaggaagcgatttcaacaagcaaggttacttatcgatatggttgcggcgttaatacgctgatgtgtcaacgccaaaacgtgggttcactgaactaaaacagtcttgaactaactttaattaatccaaaacaaacttaatttacctgatgaaaaaaagggttgagcaatgctcaaccctctatgggttttatcctataacaggcatttaaaaattactctgccagtgcttttactgccttttgaggaagcacatcgtagcggctgaaatgcatcgagaattgcccttcgccacctgtcatcgacttaagccgagtggagtaattactcacgttagccagtggcgcttcaacactcacttccactaaaccattgctacttgcttgggtaccgcaaacgatacctcttgaagaactaatatcccccgtaatttcacccacatggttttgagccacatgaatttgcatatcaacgataggttctaaaataaccggctgagccagttttaccgcttccataaaggcttttttgcccgccataacaaaagcaatctcctttgaatcgacactgtgatgcttgccatcaagcaaagttaccttcacatcctgtaatgggtatccacccatttcgcccgctaacatggcttcgcgtacacctttctcaacggctggaatgtactgggttggcacagaaccgcccaccacttgggagacaaactcaaaaccttgtccacgcgctaacggttcaacttttaattcaacttcgccaaattggccagatccacctgattgctttttatgacgatatcgatactctgcctcagccataatggtttcacggtaagccacagccggcgtatcagtttccatatccacattaaataaattttgcgctttctctaaggcaatttgaaggtgtaagtcaccttgtccttgcagcacggtttgaccttcagcttcgttgcgactgatttgtaaacttggatcttcggccaccagcttatttaatacttccgatattttctgctcatcaccacggcgtttagctgatactgccagaccaaaaataggttgcgggaatttaagctcgggtaaatggaattcatcttcatcatgactatcgtgaagcacagctcccacagataactcttcaagcttagcaatggcgcaaatatcaccaggtaacgcttgattgacattaatttgtttgtcgccttgaagtttcattaagtgagacactttaaacggcttgcgtccgctaccaatgaacaatttcattcccacagaaatcgtaccttgatacaagcggaaaacccccatacgtccaaagaacggatctatcgccaccctaaatacatgcgctaaaacatgatcagaggctttttgagtgacatcaatcggcttagcttcatcaccgtagcctttaataaattgcggcggattcgcttcaagtggattcggcattaacttaaccagaatctctaacaacgaactgatgccaatatcttgctctgcgctagtaaaacaaactggcaccaagtgccccattcttaacgctgtttccaatggcgcatgcagttgctctggcgtaagtgattcgccttgttctaaataaagctccattaaagcttcatcttcttcaagtacggtatcaaccagctcatctcttgctgtagcggcattgctaaacaaagtattgaaagtttcatcacaatgtaagtagcagtcaaccacatcatcgaccaaaccatcagctgtaacattgggtaaattaaccggtaagcatctgtggccaaattgatgttgaatatccatcatcacatcaaacaccttggcttcatttccatccatgtgatttatcgcaatgatgactgctttaccttggcttcgagcagcttcaaatgctcgttttgtcacggattcaatgccaacacttgcgttcaccactaacaatacagattcaacaccaggtaatggtaatagcgcacgtccaaagaagtcgggtaatccaggagtatcgatgaaattgatgtggtgagattgataatcgagatttaaaaatgaaggttctaaactgtgacgatgagatttttcttgggcagtgaaatcagcatgatttgtacccttatcgaccctgccttttaaacttatagcatcagcgctaaagagtaacgcctcaagtaacgaggatttacctgcgcctgtgtgtccgagcactgccagattgcggatttgctcagtggtaaactcagccatgatggcctcctttgttcacattattaaactatccatatctttgtcttactatgtttacatttgacgataaaacacccataaattcagtatagatcggtaacattgttgaataattgacacagatcactctttacacccgcaacgttttttataacaaaatcacccattcagcttacaagtgttagctctttctggtcgtatcagtaattaattagtttcgggtgattgtatcgacctgaaacctcaggtactctgcatgctcgattgtgataaaacgctaataatgaagatgaacaaacgttaatcttcagtattttttagagagtcccaatagattgtacggagtgttcattctgctatggccgtccttaaatgactgcaaaccgacaagctaaatcagccactaaaacagtggtaaaaaaatcctcttccgattgtgatgtagcgagcacacctgtgcgccatcgtaatgcgacaacgacccccgaaatgcgtcaatttatccaaacttccgactttagtgtcagccagttggctaaaattctgaacatatcagaagccacggtaagaaaatggcgcaaacgtgactccatcagcgatacacccaatacgccacatcacttaaaaaccaccctttcacctatggaagagtatgtggttgttggcttacgttatcagctgaaaatgccgttagacagattgctaaaagtcactcaacagttcatcaataaagatgtttctcgttcaggacttgcccgctgcttaaaacgctacggtgtatcgaaactcgatgaattcgaaagcccctatgttccagaacgctatttcaaccaattaccgattgttcagggtacagatgtagcgacttacacactgaaccctgaaactcttgctaaaaccctgtcattgcctgaagccacaccagacaatgtggtgcaagtggtatccctaacgattccacctcaactgactcaagcagacagctattccattttactcggtgtcgactttgcaaccgactgggtgtatctcgacatttatcaagacaaccacacacaagcaaccaatcgctatatcgcttatgtgttaaagcacggaccgttccatttacgtaaattactcgtcaaaaattatcatacttttttagcccgttttcctggtgcaacagtgttgcactctgtggaagcggcgaaccaaaaaaataaatcagctaaggatcagctgaacactggagactcaaaatgagccaagcccctacaaatcctgagacctcatctcaagataacaacgagtcgcaagatacaagactgaacaaacgtcttaaagacatgcctattgccatcgtcggcatggcaagtatctttgctaattctcgttacctgaataagttttgggacttaatcagcgagaagattgatgccatcacagaagtgcctgatacccattggcgcgctgaagattactttgatgccgataaaagcaccccagataaaagctactgtaaacgtggtggatttatcccagaagttgatttcaacccaatggaattcggcctgccaccaaatattttagaactgactgatacttcgcaattgctatcattagtgattgccaaagaagtgcttgcagatgcgggcgttacctctgagtacgataccgacaaaatcggtattacgctgggtgtgggtggcggtcaaaagattaatgcaagcttaaccgcgcgcctacaatacccagtacttaaaaaagtatttaagagcagtggtctaagtgatgctgacagcgatatgctgatcaaaaagttccaagaccaatacattcactgggaagaaaattcattcccaggctcactaggtaatgttattgctggtcgtattgctaaccgcttcgatttgggcggcatgaactgtgtagtagatgctgcatgtgcgggctctcttgctgcaatgcgtatggcgttaactgagctagttgaaggccgcagtgaaatgatgatcacaggtggtgtgtgtaccgataactcaccatcaatgtatatgagtttctctaaaacgcctgcgttcaccaccaatgaaaccattcagccatttgatatcgactcaaaaggcatgatgattggtgaaggtatcggcatggtagcacttaagcgcctagaagatgctgagcgtgatggcgaccgtatttattctgtgattaaaggtgtcggcgcttcatcagacggtaaatttaagagtatttatgcaccgcgccctgaaggccaagcaaaagcattaaaacgagcttatgatgacgctggttttgcccctgaaacagttggcttaatcgaagctcacggtacgggtactgctgcaggtgatgtagccgaatttaacggccttaaatctgtatttggtgaaaacgatccaactaagcaacacatcgctttaggttcagtgaaatcacaagtgggtcacacgaaatcaaccgctggtactgctggcgtgattaaagctgcccttgccctgcaccataaagtattgccaccgaccattaacgtctctaagccaaaccctaagcttaatgttgaggattcaccgtttttcgttaataccgaaacacgcccatggatgcctcgccctgacggcactcctcgccgtgctggtattagctcgttcggttttggtggaactaacttccacttagtattagaagaatacacccctgagcacagccatgatgagaaataccgtcaacgccaagtggctcaaagcttattaatgagtgctgataataaagcagccttgattgcagaagtgaataagctaactgcagacatcagcgcgcttaaaggcacagataacagcagcattgaacaagctgaacttgctcgcattgctaaactatatgctgttcgcaccatagatacttcagcagcccgtttaggtcttgtggtatcaagccttaatgaattaaccactcagcttggtttagcgttaaagcagcttaataatgatgttgatgcatggcaactgccatcagggactagctaccgctcttcagcactcatcacgattaatgcaaaccaaaaggcgactaaaggtaaaaaagcgactaacgcaccgaaagttgcagcattgtttgcaggtcaaggctctcagtacgtcaacatgggtattgaagtcgcttgtcacttccctgaaatgcgtcagcaattaatcaaggccgataaagtattcgcaagctttgataaaaccccgctgtctcaggtgatgttcccgattccagcctttgaaaaagcagataaagatgcacaagcagctttactcaccagcactgataacgcgcaaagcgccattggtgtaatgagcatgagccaataccaattgtttactcagtctggtttcagtgcggatatgtttgcaggtcacagctttggtgaactgtcggctttatgtgctgctggcgttatctctaatgacgattactaccagttatcatttgctcgtggtgcagctatggcttcatcagcagttgataaagatggcaatgagctagataaaggcaccatgtacgccattatcttgccagccaatgaagctgatgctgcaaacagcgataacatcgccaagctagaaacctgtatctgtgagtttgatggcgtgaaagtcgctaactacaactctgcgactcaattagtgattgctggcccaacggactcttgtgcaaatgcagccaaagccattagtgctttaggctttaaagccattgcgcttcctgtatcaggtgccttccatactccacttgttgggcatgcgcaaaaaccttttgcaaaggcaattgataaagctaaatttactgccagcaaagttgatttattctctaatgcgacaggtgaaaagcatcctgctgatgctaaatcaattaaagcggcgttcaaacagcacatgttgcaatcagtgcgtttcactgaccaattaaacaatatgtatgatgctggtgcccgtgtatttgttgagttcggacctaagaatattttacaaaagctggttgaagcaacgctaggtaataaagctgaagctgtatctgtgattagcattaaccctaatcctaaaggcaatagcgatgtgcaattacgtgtcgctgctatgcaacttagcgtattaggcgctccgcttactgaagttgacccttaccaagctgaaatcgcagcccctgctgtaccaaaaggtatgaacgtcaagttaactgcgtcaaaccacatcagcgcaccaactcgtgccaagatggaaaaatcattagcaacaggccaagtcacttcacaaatcgttgaaacgattgtagagaaagttatcgaaatgccagttgaaaaagtagtagagaaaatcgtggaaaaagaagttatcaaaactgaatatgttgaagttgccgcatctggcgcaacagcagtgcctaacgccgctgcaccagtggctcaagcttctcaagtaatagcacctcaaatgcaagttcaggcaacgcctgtagctggcagcttagaagcgttctttaatgcacaacagcaagccgctgatttacatcagcaattcttagccattccacaacagtatggtgacacctttacacacctaatggccgagcaaagtaaaatggccgctgctggacatgctattcctgagagcctacaacgttcaatggagctattccaccaacatcaagctcaaacactacaaagtcatactttgttccttgagcagcaagcacaatcaagccaaaacgcattaagcatgctgactggccaagcaccagctacaacaacgccagctgttaatgctcctagagttaatgcgcctatcactgaaaatccagtagttgctgcgccagtcgttgaagctgttaaagtagccgctacggttcaaactccgacggcacaagctccagctgttcaagcgtcaattactcaaactgctgccaaaccagccgctatggccgctccagcgccacgtattgaaccagtaaaagcaactgccccagttgcagctcctgtcgttgcgccagcagttgcagcagcacctgcaggtttaagcgcagaaacagttctgaatactatgttagaagtggttgcagaaaaaacaggttacccaactgaaatgcttgaattaagcatggatatggaagctgatcttggtattgattctatcaaacgtgttgagatcttaggtactgttcaagacgaactgccaacactacctgaactaagccctgaagatttagccgagtgtcgtacgcttggtgaaatcgttgactacatgaactctaaacttcctaaaagtgacgcttcaggaactcaaacgcaagtcgcgccagttcaagcagcatcaggccttagcgctgaaacagttctgaataccatgcttgaagtggttgctgaaaagaccggttacccaactgaaatgcttgaattaagcatggatatggaggctgatcttggtattgattctatcaaacgtgttgagatcttaggtactgttcaagacgaactgccaacactgccagaactaagccctgaagatttagctgaatgtcgtactcttggcgaaatcgttgactacatgaacagcaagcttcctgctgctggctctactccagttgcatcaccagttcagtctgcggctccggtatctggccttagcgctgaaacagttctgaataccatgttagaagtggttgctgaaaagactggttacccaactgaaatgcttgaattaagcatggatatggaagccgatttaggtatcgattcaatcaagcgtgttgagattctaggaaccgttcaagatgaactgccaacactgccagagcttagccctgaagatttagctgagtgtcgtactcttggtgaaatcgttgactacatgaactctaagcttcctacaagttcagccgcaggcgctaatacacaggctgtagctccagttgctcaagaatcaggtttaagtgctgaaacagccttgagcgcgcaagaagttcaaagcactatgatgactgtagttgctgaaaaaaccggttacccaactgaaatgcttgaattaagcatggatatggaagccgatttaggcatcgattcaatcaagcgagttgaaattctaggtacagttcaagacgaattaccaacactacctgagctaagtcctgaagatctagctgaatgtcgtactcttggtgaaatcgtatcttatatgaattctaagttacccgccgcaggcgctatgaacagcacagccgttgtagctcaagcttctggtttaagtgctgaaacagccttgagcgcgcaagaagtacaaagcaccatgatgactgtggttgctgaaaaaaccggttacccaactgaaatgcttgagctaagcatggatatggaagcggatttaggcatcgattcaatcaaacgagttgagatcttaggtacagttcaagatgaactaccaacgctaccagagcttaaccctgaagatttagctgagtgtcgtacccttggcgaaatcgtgagctacatgaacagcaagcttcctgctgtcagtgcgacaactgccgcagggactcaaacacaagcagccgcaggcgctactcaagcttctggtttaagtgcagagcaagtgcaaagcactatgatgacagtcgttgctgaaaaaaccggttacccaactgaaatgcttgagctaagcatggatatggaagcagatttaggcatcgattcaatcaaacgtgttgaaattttagggacggttcaagacgagcttccaggcttacctgaattaaaccctgaagatttagcagagtgtcgcaccctaggtgaaatcgttagctatatgaacagcaaactttcaacaagtgcagctgaaggctctcagccaacgctaagctcaactgacacttcaccagcaacagccacagctgagttagcaacagacttacctcctcatcaggaagttgctctaaaaaagctaccagcggcggataagttagttgacgttttttcaaaagacgcatgtatcgttatcaatgatgacggccataacgcaggtgttttagctgaaaaattagtagcaacaggcctaaccgtcgccgttattcgtagccctgagtcagtgacatctgcgcaatcaccgcttagcagtgatattgccagcttcactttatctgcggtcaatgacgacgcgattagcgatgtcattgctcaaattagcaagcaacataagatcgccggctttgttcacctgcaacctcaactaacagcacaaggtgctttgccattaagtgatgcaggttttgtagcagtggagcaagctttcttgatggctaaacacctacagaaaccatttgctgagctagctaaaactgagcgcgtaagctttatgactgttagccgcattgatggcggatttggttacttaaacagtaacgaacttgcaaaggctgagctaaaccaagctgcattatctggtttaactaaaacattaggtcatgagtggccaactgtgttctgtagagcattggatattaccccaagctttgaggcagttgagttagcacaagccgttattgaagagttatttgatcttgatactgcaactgctgaagtgggtattagcgaccaaggtcgtcataccttatctgctaccactgcagctcaaacccgttaccaaaccacatcattaaacaatgaagatacagtgttggtgactggcggagcaaaaggcgtcacattcgaatgtgcccttacccttgcgaaacaaactcagtcacactttatcttagcgggtcgcagtgagcatttagccggtaatttaccgacttgggctcaaggcaaacaggctaaagaattgaaagctgctgcaattggatttattcaatctcaaggtaataagccaacaccaaagcaaattgatgccttagtttggccgattaccagcagtttagaaattgatcgctcattagcagcatttaaagctgtcggtgcaagtgctgaatacatcagcatggatgtcagctcagatgcagccatcaagcaatcacttgctggcctcaaaccgattacaggcatcattcatggtgcgggggtactcgccgataaacacattcaagacaaaacattagctgagttaggccgtgtatatggcactaaagtctcgggctttgccggcatcatcaatgcgattgatgcaagtaaattgaagctagttgctatgttctcatcagcagcgggtttctatggcaacactggtcaaagtgattactcaatgtcgaatgagatcctaaacaagacagcactacaacttgcagcgaactacccgcaagcaaaagtgatgagctttaactggggaccttgggacggcggtatggtcagttcagcgttaaagaaaatgtttgttgagcgcggcgtatacgttattccactcgataaaggcgcaaacttgtttgctcacagcctattgtctgaatctggcgtacagctattaattggttcaagtatgcagggctcaagctcagcagctaaaacaggcgcagctgtaaaaaagcttaatgcggactcttcgcttaatgccgagggttcgctgattctttcttttactgctccagataaccgtgttgttaacaacgcggttactgttgaacgagtactaaacccagttgcaatgcccttccttgaagatcattgcatcgcgggtaatccagtactgccaacagtgtgcgctatacaatggatgcgtgaaactgcgcaaaaactgtgtggcctacctgtgacggttcaagattataaattgctgaaaggcattattttcgagactaaagagccacaagtattaacgctgacattgacgcaaacagaatcaggcttaaaagcactgattgcgagtcgtatgcaaagtgatgccgttgatagcttgcttagacctcagtatcaagcaaacctgattgttaacgagaagattgttaacgagaaggttgctaaagaagcggtttcaaccacgctaccaactgcagcaaaaaatgcgcagcaattagcaagctcaggtaaagtcattagcactgatagcgagctatatagcaatggcagcttattccacggccctcgccttcaaggaataaagcagttgttaattgccaacgatgagcaattggtttgctcagttgagttgcctcaaattaccgctgtagattgcgcaagctttacaccgcaaacaggtttaggtggtagtcaggctttcgctgaagacttacttttacaagccatgttagtgtgggcgcgtatcaaacacgatgcagcgagcttaccgtcaaccattggtgaattaaccacatacgccccattcgcctcgggtgataaaggttacttagtgttaactgtgcttaaaagtactagccgttcattgactgctgatattgcgctttatcatcaagatggccgcttaagctgcactatgctaagcgcaaaaacgaccatcagcaaaagcttgaatgaggcctttttagccccagccaaagcattagctgatttgcaggagtctgtgtgagtaatcaactgcctccttcaacgtctgctattaaaagcatgcgaatagccttaaagatggttgcgaatgagcaagtctcattcgcaacatcttcaggcaatgattttagtgccaatagctttgcagcgattaagccttgctcattagctgaggccattggcgcttcagcaattgatcttgaaattgatgtatcaagcctagatgcgagtttgagtgaaaacgctgttaataaagcacttagctttaatgactattttgctcaagccatcatccatatcgagcaacaacatacggttttactcagtcaccctgaattaccgtatcgcttattaatgatgccagcgattgtggcggctaaacatcgttgccatcctcatgcctacttaaccggtttgggtgaagctgatgatatgccaagtgcaataaatgcggctttagttcaagccaagcgtgcacacattaaacctactcatgtcgatgcgactcaattaacttgttataaagataagtttgcccagttggttatgctgataggcagcattgccactcgcagtgtgccaaatacagtttcagaaaatcagtcagctgatgctcaatactggttcactgaaatgcaccaaaatcgcgttgccagctttaattttagtgaaggcaataagcaacacagtgcagtctttgtccaaggcactgagcttgctcaagcaagttctttggtagatgacaatcgactatttttgcctgtatcagccaatgaccttggaatgatgaaacagcagctgcaagcattaagcagtcaattggctgcgctgcctgcacaacatgacaagagtgacagttccgctatctccttcatgcttagccagctaaagcaatttgatcagacccagcctttatcggcagttgttatggcaaattcagtgactaatgcagtaagtgaaatcaatgtcatgcttagcacgattggtaaagctgaagccactgcggcaaatgaagttcaagctaaaagcaacttaagcattgaacacaaaaccccgtcaggaagctgctttcatctcacttcagataaagtacttggcaataatggcctgtgttttgtttaccctggcgtgggcacggtatacccgcaaatgtttgctcaactgccgcgctactttccagcattatttgcccagctagagcgcgatggtgatgtcaaagccatgctgcaagcggatagtatttatgctgaaaatgctaaaaccactgacatgagcttaggtgaactagctattgcaggtgtaggcgcaagttacatcctaaccaaagtgctcactgagcatttcggcattaagcctaactttgccatgggttactcaatgggcgaggcatcaatgtgggccagtcttgatgtgtggaaaacaccccacaatatgattgaagcaacgcaaactaacagtatttttaccactgacatttcgggccgcttagactgcgttcgtcaagcatggcagctagaacatggcgaagacattgtttggaatagctttgtggttcgtgcagcgcctgctgatatcgaaaaagtattagctgatttcccacgtgcataccttgctatcatccaaggtgatacttgtgtgcttgcaggctgtgaggaaagctgtaaagcgctacttaaacaaattggtaaacgtggcatagcagcgaatcgagtaaccgcaatgcacactaaacctgcgatgcttattcgagacaacgtacaagccttttatcagcagcctttgcatgagcaagatgttattgcacctttcgcaagccaaattaaatttatcagcgctgcaagccaatcgccgattaatttaaccagtgaagcgattgcaacatccattgctgataccttttgtcagccgttagattttacacaattagtcaataatgcacgtcatttaggcgcctcgctttttgtcgaaatcggcgctgacagacaaacgacaacactgattgacaaaatctcgcgtacctctgaaatggcgcaaacatgccaagccatttcagtgaatgcaaaaggcgatgaccaaactgcgctacttaaatgtattgctcaactgattactcataaaaccccaatttcgctcgattatcttactgagaccttgtcgagtttactgacgacaacattggcggcagaaaaacgaagtaatcaccacacaggcaatatgttggcccctcaattagaaggagaacaatcttgagttctcaatcaactaatctaaatacaacagtcccaaagattgccattgtaggtttagcgactcaatatcccgatgcggatacgcccgctaaattctggcaaaacttattagacaaaaaagactctcgaagcacgattaacagccaaaagctcaatgcaaacccagctgactatcaaggtgtgcaaggtgagtctgaccgtttttattgtgataaaggcggctacattcaaaacttcagttttgatgctaatggctatcgtattcctgccgagcaatttagcggccttgatgacagttttttatgggcaaccgatacagcacgtaaagcattgaatgatgctggtgttgatattacaaacccacaaaacaatggcgcattaaaccgcaccggtattgtcatgggaacactatcgtttccaacggctaaatccaatgaactgttcgtaccgatttatcacagcgcagtagaaaaagcgttgcaagataaactgcaacaaccaagtttcacattgcagccatttgatagtgaaggatatagtcagcaaacaacgtcagcttctttgtctaatggcgccattgctcacaatgcatctaaactagtcgccgatgcgctaggcttaggtgcagcgcaattaagccttgatgctgcttgtgcaagttctgtttactcattaaagcttgcctgtgattatttgcatactggcaaagctgacatgatgttagctggcgcagtttctggcgctgacccattctttattaacatgggtttctccattttccacgcctaccctgaccacggtatttcagcgccatttgatagtaattcaaaaggtttgtttgctggtgaaggtgctggtgttttagtccttaaacgccttgaagatgctgagcgcgatggcgaccatatttatgcactcgttagcggtatcggtttatcaaatgacggcaaaggccaatttgtattaagcccaaacagcgacggccaagttaaagcattcgaacgtgcttatgctgatgctgctatgcatgatgaaaactttggcccaaacaacatagaagtgcttgagtgtcacgcaacaggtacgccattaggtgacaaagttgagctgacgtcaatggagcgcttttttagcgacaaactcaatggcagtaacacgccgttaattggttcagctaagtctaacttaggccacttgctgactgctgcaggtatgccagggatcatgaaaatgatttttgcgatgcgccaaggtgttctgccgccaagtattaatattagcgcaccgattgcttcaccatcagaaatgtttggccctgcaaccttacctaatgatgttctcccttggcctgataaagctggcaatacagcccgccatgcgggtgtgtcagtatttggttttggcggttgtaatgcccatttattagttgagtcatactttgcgaagagtcatggccagccttctagcacagagttagttaaaccagcgacaacgaccatcaatgcgcaaatgccaatgcacattaccggtatggcatcacactttggttcgttgtcgaacgtaaatgactttgctgatgcggtaaataacaatcaaaccgcatttacctcattgccagctaaacgctggaaaggtttagataaacacccagagttattacaaaaattcggactgagtcaagctgcgccaacaggtgcttatattgatcaatttgatttcgacttcttacgctttaaagtgccacccaatgaagatgaccgtttaatctcgcagcaattgttattaatgaaagtagcagatgaagccattcatgatgccaaacttgagtcaggtagcaaagtggcggttttggttgcaatggaaacagaacttgaattacatcagttccgtggccgcgttaacttacatacccaaatagctgccagcttaacagcccatggcgtgagcttatctgatagcgaataccaagcattagaaaccattgcgatggacagcgtgttagatgccgccaagcttaaccaatacaccagctttattggtaatattatggcgtcacgcatctcatcattatgggattttaatggccctgcctttacgatttcagcaggcgagcaatcagttaaccgctgtattgatgtggcgcaaaacctactggcgatggagtctcgtcaagagcctctagatgcagcgattattgccgcagtggatttatctggcagtattgaaaatatcgtgcttaaaacggcgaacattaataaaacaggctcaactgaagcactcaatattggtgaaggggctggcgcaattgtattgcaagcagccgctattgatagcgagcactgcgacctaatacatcaaggtttaggcgcgttagatacgctagattcagcaagcacccacagttatggcaccatcgacagtttggcatttggtcatacagaccagctttcaaccattagcgatgacgtgttaactcctgttggattggctgcaactgatattgatttattagagttaaaccaagcacctgatttgctcaatattgataatgcgcaaatgctatcgcagctatttaaccaatcgagcaccagcaaagcgcaatcttgtatcgggcacacttttgccgcttccggtattgccagcttattgcatggcttattgaaaactcgattgaatgcttctgtgcagaacgctaactcggatagcaaactgagcaataagcccaaccaaaaggccataatcgctactttgagcgaaaaccagtgttcgcagcttcttatcagccaaaacgctgaacaagcaagcgcgatgagcactcgtattgacactgatatacaagcgcaaacggccaagaaattgagcctagttaagcaagtcagtttaggtggtcgtgacatctaccagcatattgttgatgcgccactggctaacattgacagtattagagcgaaagttgccaagcttaaccctgttgcacctacaactgtgatgaacttacatgaccgcggccaatttatcgcgccagctcatgccaattcagcgcctatgtccgctaacaataattcaatgactacagagacttctatgccgttttctgatcgttcaacccagtttaaccctacacctaaagtggctacgcctactgcactttccactcaggcagctcaggcaactcagtcagctcaaacgtcttcagtgacgagctctgtcgcagcaattagccaagtgccacctacgcatttaagcgcttttgagcaaaaccaatggttagcacatcaagcgcaattagcatttttaaagagccgcgaacaaggcttaaaagtcgctgatgcacttttaaagcaagagattgcacaagcaaatggtcagccttatgttgcccaatcgacggcacaagctgtagcgcccgtccaagcggcaaacgtgttagcgcagccaatagcatctgcgtcaatcttgcgtccagatcatgcaaatgtgccaccctacacagcgcctatcccagcgaataagccatgtatttggaactacgctgatttagtagaatatgccgaaggtgatattgccaaagtatttggcccagattacgccgtgattgataactactctcgccgcgtacgccttcctacaactgattacttattggtatctcgcgttactaaactcgatgcaacaatgaaccaatataagccttgtagcatgaccacagagtatgacatcccagaagatgcaccttacttagtcgatggccaaatcccttgggcggtagccgttgaatcaggccagtgtgatttaatgctgatcagttatttaggcattgattttgaaaacaaaggtgagcgtgtttaccgtttacttgattgtacgctgaccttcttaggcgacttacctcgtggcggcgacacattgcgttacgacattaaaatcaataacttcgctaagaatggcgagacactattattcttcttctcctacgaatgtttcgtcggcgataagatggtcttaaaaatggatggcggctgtgctggcttctttaccgaccaagagttagatgacggtaaaggggttatttacaccgaagatgaaatcaaaacccgtgaagcggcgttaaatacgccaaacaaaccgcgttttgaaccgctattacattgtgctcagactcaatttgactatggtcaaatccatcatttactcaatgctgatattggcagctgttttgctggcgaacaccataaccaccagcaagcatcaggtaagcaagactcattatgttttgcctctgaaaagttcttgatgattgagcaagtgggcaatttagaagtccatggcggcgcttggggcttaggctttatcgaaggccataaacaattagcacctgatcattggtacttcccttgtcatttccaaggcgaccaagtaatggctggctcattaatggctgaaggttgtggccaattattgcagttcttcatgctgcacattggtatgcacaccttagttgaaaacggacgtttccagcctttagaaaatgcttcacaaaaagtacgttgtcgtggccaagtactgccacaacatggtgaactgacgtaccgcatggaagtcacagaaattggtactcaccctcgcccatacgccaaagccaatattgaaatattgctcaatggtaaagcggtcgtggacttccaaaatcttggggtgatgattaaagaagaaggtgaatgtactcgttacactgccgactctactgaaacacatacaacctcaggcacagtccaaaaaaacaacagccacaacacaccagcatcattaaatgcaccgttaatggcacaagtgccagacttaagtgaaccagccaataaaggcgttatcccgctgcaacatgttgaagcgcctatgctgccagactacccaaatcgaacccctgatacgctgccgttcaccgcgtaccatatgtttgagtttgcaacaggtgacatcgaaaactgttttggacctgactttagtatttaccggggctttattccgccgcgcacgccatgtggtgacttacagctaacaacccgtgttgttgatattcaaggtaaacgtggcgagcttaaaaaaccgtcatcgtgtatcgctgaatatgaagtgccaaccgatgcgtggtattttgctaaaaacagtcacgcttcagtgatgccttactcggtattaatggaaatatcactgcaaccaaacggatttatttcgggttacatgggcacaacccttggtttcccagggcaagagctattcttccgtaaccttgatggtagcggtgagttattgtgtgatgtagatttacgcggcaaaaccattgtcaatgattctaagctattatctaccgttattgccggcagtaacatcatccaaagtttcagctttgatttaagtgttgatggcgagcctttctatactggtagcgctgtatttggttactttaaaggtgatgcacttaaaaaccagctaggtattgataatggccgtattactcagccatggcatgttgaaaataacgtagcggctgatatcaccgttgatttgcttgataagcagtcccgcgtattccatgcaccagcaaaccagccacattatcgtttagctggcggtcaacttaactttatcgacaaagctgaaatcgttgataaaggcggtaaaaatggtttaggttacttgtctgcctcacgcaccattgacccaagtgattggttcttccagttccacttccatcaagatcctgtgatgccaggttcattaggcgttgaagcaattatcgagttaatgcaaacttacgccatcagtaaagacctaggtaaaggtttcactaacccgaaatttggtcagattttgtctgacatcaaatggaagtaccgtggccaaatcaacccactaaataagcaaatgtcgctggatgtgcacatcagtgcagtcaaagatgaaaacggcaaacgtatcattgtgggtgacgcaaacctcagcaaagacggtttacgtatttacgaagtaaaagacatcgctatctgtatcgaagaggcataaaggaataataatgactattagcactcaaaacgaaaagctttctccatggccttggcaagtagccccaagtgatgccagctttgagaatgccgctatcggtaaaaaattaaaagaactgtctcaggcgtgttatttaattaaccaccctgaaaaaggcttaggtatttcgcaaaacgcacaagtaatgactgaaagcatgaacagccagcaagacttaccagttagtgcatttgcacctgctttaggcactcaaagcttaggcgacagtaatttccgccgcgttcacggagtaaaatacgcctactacgctggcgcgatggccaatggtatttcatctgaagagttagtgattgcattaggccaagctggtattttgtgttcatttggcgcagcaggattaattccatctcgcgtagaacaagccattaatcgcattcaaacggcgctacccaatggcccgtacatgtttaacttaatccacagcccaagtgagccagcattagaacgtggcagtgttgagttatttttaaaacataaagtgcgcacggttgaagcatcagcatttttagggttaaccccgcaaattgtctattaccgcgctgcaggtttaagccgtgatgctcaaggtgaagtggttatagccaacaaggttatcgctaaagtaagccgcacagaagtagcgagtaagttcatgcaacctgcacctgctaaaatgctgcaaaagctggttgatgaaggcttaatcacacctgagcaaatggagctcgcacaattagtcccaatggcagatgatgtgacagcagaggctgattctggtggtcataccgataaccgtccattagtgacgctattgccaacaattttggcgcttaaagataaaattcaagccgagtaccaatacaagacgcctattcgtgtcggttgcggcggcggcgtgggaacacctgatgcagcattagcgacctttaacatgggcgcagcgtatatcgttaccggctcaatcaaccaagcgtgtgttgaagctggtgccagtgaacatactcgtaaattattagcgacaacagaaatggccgatgtcaccatggcacctgctgctgatatgtttgaaatgggcgttaaactacaagtggttaagcgcggtacactattcccaatgcgtgccaacaagctttatgagatttacactcgttatgaatcaattgaagcgattccagctgaagaacgtgaaaaactagagaaacaagttttccgttcaacccttgatgatatttgggcaggcactgtggctcactttaacgaacgcgaccctaagcaaatcgaacgcgcagaaggaaaccctaagcgtaaaatggcactgattttccgttggtacttaggtttatcaagccgctggtcaaattcgggcgaagtcggccgtgaaatggattaccaaatttgggcaggtcctgcacttggtgcgttcaatgaatgggcaaaaggcagctatttagatgattatacccagcgaaatgcggtagacttggccaaacacttgatgcatggcgcagcttatcaagcccgcgttaacttattaactgctcaaggcgtggcactgccggttgaattgcaacgctggagcccgctagatcaggttaagtaacggacgttgtagctttataacgtcagcagtgatactcgccatattgcgatcaagttaaccattactattgtgccactcactcaacatgagtggcacattgatatttagtttgcagttaggtaacagtatgagcgaaacccaaaagttagatttttcagcggtaaatggcacaacactagcctcgtttaatcagcataaaaacttgatcaaacgtatgctaaaaggcaacagcgctgaatgtagcgagtgtaaaaaaccactcactttgcaattaccgcctaacattaagaacgctaaaccaagtgataaagcaccaggcatatattgcgcaaaaggctgtaccgatatcgagctagatatggaagcagtggcattaatgaagtagccgaagataagaacacagttctttaggtataagcctttataagcacaattacgaagcaccttatgggtgcttttacttttcctatcccaccaaagatattgttttaactaacttaagaagggttagtatgtggcataactaactcagctaaccattcataatatttttcattcccatgaatccaatccacttgtccatttgaataagttattgggctgataaattcatgaaagtcataaccttcttcgataaaaatacgagcagcattgacaaacgttatatcaaattgtgctagtacgtaatctatcgcctcaaaatatgcaaaaataatatttgccataggtttagcttcttcaacaaatttactaaaaggaggatctgaaacaacaattactttatggccaatacttttcaatttgatcaaaatagataattgatcctgaatgtcatcatgaaagtaatctacaaattccttagtctcaatattactaatcccttgtggatattgacgtttcacccagtctacaaatctagctgcactttgatgtgtctgtagacccacattacatataactgtagattgactaaccgttttattattttcatgtatagataagttatttaatacatctttccaaagtgttctagacgctgcactttctaaaggcacgaatatctcagtatcacatatagcaaacttcttttgcgcgaaccctgatccattcattatcattcctcctgtatgaggaatattccttaatttcattgcattagaaagttttcccatatgactatcaccaaatatggaaatggaatccccgtcattcgatagttgtttagagttcaactttctagaagcttgtaaaaactcttcatcgcaaactacttcatcacttactgttttatcaactttatcggtaattgaaatatctttacttaatgtttcaccaaaatgcttcatgacataactgaccatctctgctgtaacagttcttagattttccttaaatctatagtctgtagaaatgggtaatgtaactaattcataagaaggaaaataactaaatactgcctcatattcacttagttcacctgcaacagctcgtaatgtcgacttagagtattggttagcgattgctatatgatttgacgtagctgtagctgttaatggtacgggtgagacagtgagtacaatctgaatgttaggatttatacattctacaactttagctatttctttaagatcattttgaatttcagcgaatgtaaaattatgaaaattataatttttttgtttatattctccttggataaccccgggacaactaggatagcaaaccccatttatatcaaaccatgcttctgttaatcccaatgtaaaaattaacacatcagtcttcgcaattgtttgcttcatttcatcaacggcagcttttcttgcctgaattaaagcactctcggatgagtaacctaactcgttatataaaggtcttagcaaatcatagaatcttgtttcattgtgataaattgagtgatctgtcttgaagctctgattatcacaattaagccactgtaaaaaacaccttggcgtataaacatttccaaaagcaaaactagatacattagcttcgtctaattcactttgattaaaattaaaattattgtcatttagccacttaccgacatgctgagcaaaacatgaaccaactgacgatattctgggcacattagttttgaaatttatatcaaccaaattagatattgtttcttcaaaatagttttgagaaacaacgccagttttccaaaagtgctgggaagctttatgtgtataaggtgtcaatttaaactccaaaaatgatatggttaagctcatagtcaaattagtgactttcattaaagtaagcattatatatgccatttaaatactaactataaaactgaaattcgacttgccactcacccaccaaatagccttgctaaatctattcctctcgtcataaagtctcatttttaccaacaaaaataatgcgttaacatttttttgacctgtatcaataataagtcttattagctaaggcactatgcctcattatttttaatgtggttatattttttatgagtcaaatcaaggctaacaacaatattgagcaagcgctaactgacaattgcattcttttgtcgaccacagatctgaatggcaacataaaatacgccaataaagcatttgccgatatttcagaatacagcactgaagagctacatggacagcctcataatattgttcgtcaccctgatatgcctaaagctgcatttaaagcactttgggatcgtgtaaaagatggcaaaccatggtgtggcatcgttaaaaataaaaccaaatctggcaaatattactgggtgaatgcgtatatttcgccagtttttgaaaatggccgtttacatgaacttcaatcaatcagacgtaaaccatgtcaggcacatatcaaatcagctgaaagcatctaccaacaacttaatgaaggtaaagaacctgctgcgatatcaccaccactctttagcttcacgggtgcactctgcctatgggcagtgtttatctcgttaattggcgttatttcttcgttattaatgcctacgctagttgcagcattttttatcccgttactggcaggttttggtatttactttctaacaagaccccttaaagaacttgaaactaaagccaccaatattattgatgatc

SEQ ID NO: 76 - protein, 2768 aa, Sh. olleyana
MSQAPTNPETSSQDNNESQDTRLNKRLKDMPIAIVGMASIFANSRYLNKFWDLISEKIDAITEVPDTHWRAEDYFDADKSTPDKSYCKRGGFIPEVDFNPMEFGLPPNILELTDTSQLLSLVIAKEVLADAGVTSEYDTDKIGITLGVGGGQKINASLTARLQYPVLKKVFKSSGLSDADSDMLIKKFQDQYIHWEENSFPGSLGNVIAGRIANRFDLGGMNCVVDAACAGSLAAMRMALTELVEGRSEMMITGGVCTDNSPSMYMSFSKTPAFTTNETIQPFDIDSKGMMIGEGIGMVALKRLEDAERDGDRIYSVIKGVGASSDGKFKSIYAPRPEGQAKALKRAYDDAGFAPETVGLIEAHGTGTAAGDVAEFNGLKSVFGENDPTKQHIALGSVKSQVGHTKSTAGTAGVIKAALALHHKVLPPTINVSKPNPKLNVEDSPFFVNTETRPWMPRPDGTPRRAGISSFGFGGTNFHLVLEEYTPEHSHDEKYRQRQVAQSLLMSADNKAALIAEVNKLTADISALKGTDNSSIEQAELARIAKLYAVRTIDTSAARLGLVVSSLNELTTQLGLALKQLNNDVDAWQLPSGTSYRSSALITINANQKATKGKKATNAPKVAALFAGQGSQYVNMGIEVACHFPEMRQQLIKADKVFASFDKTPLSQVMFPIPAFEKADKDAQAALLTSTDNAQSAIGVMSMSQYQLFTQSGFSADMFAGHSFGELSALCAAGVISNDDYYQLSFARGAAMASSAVDKDGNELDKGTMYAIILPANEADAANSDNIAKLETCICEFDGVKVANYNSATQLVIAGPTDSCANAAKAISALGFKAIALPVSGAFHTPLVGHAQKPFAKAIDKAKFTASKVDLFSNATGEKHPADAKSIKAAFKQHMLQSVRFTDQLNNMYDAGARVFVEFGPKNILQKLVEATLGNKAEAVSVISINPNPKGNSDVQLRVAAMQLSVLGAPLTEVDPYQAEIAAPAVPKGMNVKLTASNHISAPTRAKMEKSLATGQVTSQIVETIVEKVIEMPVEKVVEKIVEKEVIKTEYVEVAASGATAVPNAAAPVAQASQVIAPQMQVQATPVAGSLEAFFNAQQQAADLHQQFLAIPQQYGDTFTHLMAEQSKMAAAGHAIPESLQRSMELFHQHQAQTLQSHTLFLEQQAQSSQNALSMLTGQAPATTTPAVNAPRVNAPITENPVVAAPVVEAVKVAATVQTPTAQAPAVQASITQTAAKPAAMAAPAPRIEPVKATAPVAAPVVAPAVAAAPAGLSAETVLNTMLEVVAEKTGYPTEMLELSMDMEADLGIDSIKRVEILGTVQDELPTLPELSPEDLAECRTLGEIVDYMNSKLPKSDASGTQTQVAPVQAASGLSAETVLNTMLEVVAEKTGYPTEMLELSMDMEADLGIDSIKRVEILGTVQDELPTLPELSPEDLAECRTLGEIVDYMNSKLPAAGSTPVASPVQSAAPVSGLSAETVLNTMLEVVAEKTGYPTEMLELSMDMEADLGIDSIKRVEILGTVQDELPTLPELSPEDLAECRTLGEIVDYMNSKLPTSSAAGANTQAVAPVAQESGLSAETALSAQEVQSTMMTVVAEKTGYPTEMLELSMDMEADLGIDSIKRVEILGTVQDELPTLPELSPEDLAECRTLGEIVSYMNSKLPAAGAMNSTAVVAQASGLSAETALSAQEVQSTMMTVVAEKTGYPTEMLELSMDMEADLGIDSIKRVEILGTVQDELPTLPELNPEDLAECRTLGEIVSYMNSKLPAVSATTAAGTQTQAAAGATQASGLSAEQVQSTMMTVVAEKTGYPTEMLELSMDMEADLGIDSIKRVEILGTVQDELPGLPELNPEDLAECRTLGEIVSYMNSKLSTSAAEGSQPTLSSTDTSPATATAELATDLPPHQEVALKKLPAADKLVDVFSKDACIVINDDGHNAGVLAEKLVATGLTVAVIRSPESVTSAQSPLSSDIASFTLSAVNDDAISDVIAQISKQHKIAGFVHLQPQLTAQGALPLSDAGFVAVEQAFLMAKHLQKPFAELAKTERVSFMTVSRIDGGFGYLNSNELAKAELNQAALSGLTKTLGHEWPTVFCRALDITPSFEAVELAQAVIEELFDLDTATAEVGISDQGRHTLSATTAAQTRYQTTSLNNEDTVLVTGGAKGVTFECALTLAKQTQSHFILAGRSEHLAGNLPTWAQGKQAKELKAAAIGFIQSQGNKPTPKQIDALVWPITSSLEIDRSLAAFKAVGASAEYISMDVSSDAAIKQSLAGLKPITGIIHGAGVLADKHIQDKTLAELGRVYGTKVSGFAGIINAIDASKLKLVAMFSSAAGFYGNTGQSDYSMSNEILNKTALQLAANYPQAKVMSFNWGPWDGGMVSSALKKMFVERGVYVIPLDKGANLFAHSLLSESGVQLLIGSSMQGSSSAAKTGAAVKKLNADSSLNAEGSLILSFTAPDNRVVNNAVTVERVLNPVAMPFLEDHCIAGNPVLPTVCAIQWMRETAQKLCGLPVTVQDYKLLKGIIFETKEPQVLTLTLTQTESGLKALIASRMQSDAVDSLLRPQYQANLIVNEKIVNEKVAKEAVSTTLPTAAKNAQQLASSGKVISTDSELYSNGSLFHGPRLQGIKQLLIANDEQLVCSVELPQITAVDCASFTPQTGLGGSQAFAEDLLLQAMLVWARIKHDAASLPSTIGELTTYAPFASGDKGYLVLTVLKSTSRSLTADIALYHQDGRLSCTMLSAKTTISKSLNEAFLAPAKALADLQESV

SEQ ID NO: 77 - protein, 743 aa, Sh. olleyana
VSNQLPPSTSAIKSMRIALKMVANEQVSFATSSGNDFSANSFAAIKPCSLAEAIGASAIDLEIDVSSLDASLSENAVNKALSFNDYFAQAIIHIEQQHTVLLSHPELPYRLLMMPAIVAAKHRCHPHAYLTGLGEADDMPSAINAALVQAKRAHIKPTHVDATQLTCYKDKFAQLVMLIGSIATRSVPNTVSENQSADAQYWFTEMHQNRVASFNFSEGNKQHSAVFVQGTELAQASSLVDDNRLFLPVSANDLGMMKQQLQALSSQLAALPAQHDKSDSSAISFMLSQLKQFDQTQPLSAVVMANSVTNAVSEINVMLSTIGKAEATAANEVQAKSNLSIEHKTPSGSCFHLTSDKVLGNNGLCFVYPGVGTVYPQMFAQLPRYFPALFAQLERDGDVKAMLQADSIYAENAKTTDMSLGELAIAGVGASYILTKVLTEHFGIKPNFAMGYSMGEASMWASLDVWKTPHNMIEATQTNSIFTTDISGRLDCVRQAWQLEHGEDIVWNSFVVRAAPADIEKVLADFPRAYLAIIQGDTCVLAGCEESCKALLKQIGKRGIAANRVTAMHTKPAMLIRDNVQAFYQQPLHEQDVIAPFASQIKFISAASQSPINLTSEAIATSIADTFCQPLDFTQLVNNARHLGASLFVEIGADRQTTTLIDKISRTSEMAQTCQAISVNAKGDDQTALLKCIAQLITHKTPISLDYLTETLSSLLTTTLAAEKRSNHHTGNMLAPQLEGEQS

SEQ ID NO: 78 - protein, 2020 aa, Sh. olleyana
LSSQSTNLNTTVPKIAIVGLATQYPDADTPAKFWQNLLDKKDSRSTINSQKLNANPADYQGVQGESDRFYCDKGGYIQNFSFDANGYRIPAEQFSGLDDSFLWATDTARKALNDAGVDITNPQNNGALNRTGIVMGTLSFPTAKSNELFVPIYHSAVEKALQDKLQQPSFTLQPFDSEGYSQQTTSASLSNGAIAHNASKLVADALGLGAAQLSLDAACASSVYSLKLACDYLHTGKADMMLAGAVSGADPFFINMGFSIFHAYPDHGISAPFDSNSKGLFAGEGAGVLVLKRLEDAERDGDHIYALVSGIGLSNDGKGQFVLSPNSDGQVKAFERAYADAAMHDENFGPNNIEVLECHATGTPLGDKVELTSMERFFSDKLNGSNTPLIGSAKSNLGHLLTAAGMPGIMKMIFAMRQGVLPPSINISAPIASPSEMFGPATLPNDVLPWPDKAGNTARHAGVSVFGFGGCNAHLLVESYFAKSHGQPSSTELVKPATTTINAQMPMHITGMASHFGSLSNVNDFADAVNNNQTAFTSLPAKRWKGLDKHPELLQKFGLSQAAPTGAYIDQFDFDFLRFKVPPNEDDRLISQQLLLMKVADEAIHDAKLESGSKVAVLVAMETELELHQFRGRVNLHTQIAASLTAHGVSLSDSEYQALETIAMDSVLDAAKLNQYTSFIGNIMASRISSLWDFNGPAFTISAGEQSVNRCIDVAQNLLAMESRQEPLDAAIIAAVDLSGSIENIVLKTANINKTGSTEALNIGEGAGAIVLQAAAIDSEHCDLIHQGLGALDTLDSASTHSYGTIDSLAFGHTDQLSTISDDVLTPVGLAATDIDLLELNQAPDLLNIDNAQMLSQLFNQSSTSKAQSCIGHTFAASGIASLLHGLLKTRLNASVQNANSDSKLSNKPNQKAIIATLSENQCSQLLISQNAEQASAMSTRIDTDIQAQTAKKLSLVKQVSLGGRDIYQHIVDAPLANIDSIRAKVAKLNPVAPTTVMNLHDRGQFIAPAHANSAPMSANNNSMTTETSMPFSDRSTQFNPTPKVATPTALSTQAAQATQSAQTSSVTSSVAAISQVPPTHLSAFEQNQWLAHQAQLAFLKSREQGLKVADALLKQEIAQANGQPYVAQSTAQAVAPVQAANVLAQPIASASILRPDHANVPPYTAPIPANKPCIWNYADLVEYAEGDIAKVFGPDYAVIDNYSRRVRLPTTDYLLVSRVTKLDATMNQYKPCSMTTEYDIPEDAPYLVDGQIPWAVAVESGQCDLMLISYLGIDFENKGERVYRLLDCTLTFLGDLPRGGDTLRYDIKINNFAKNGETLLFFFSYECFVGDKMVLKMDGGCAGFFTDQELDDGKGVIYTEDEIKTREAALNTPNKPRFEPLLHCAQTQFDYGQIHHLLNADIGSCFAGEHHNHQQASGKQDSLCFASEKFLMIEQVGNLEVHGGAWGLGFIEGHKQLAPDHWYFPCHFQGDQVMAGSLMAEGCGQLLQFFMLHIGMHTLVENGRFQPLENASQKVRCRGQVLPQHGELTYRMEVTEIGTHPRPYAKANIEILLNGKAVVDFQNLGVMIKEEGECTRYTADSTETHTTSGTVQKNNSHNTPASLNAPLMAQVPDLSEPANKGVIPLQHVEAPMLPDYPNRTPDTLPFTAYHMFEFATGDIENCFGPDFSIYRGFIPPRTPCGDLQLTTRVVDIQGKRGELKKPSSCIAEYEVPTDAWYFAKNSHASVMPYSVLMEISLQPNGFISGYMGTTLGFPGQELFFRNLDGSGELLCDVDLRGKTIVNDSKLLSTVIAGSNIIQSFSFDLSVDGEPFYTGSAVFGYFKGDALKNQLGIDNGRITQPWHVENNVAADITVDLLDKQSRVFHAPANQPHYRLAGGQLNFIDKAEIVDKGGKNGLGYLSASRTIDPSDWFFQFHFHQDPVMPGSLGVEAIIELMQTYAISKDLGKGFTNPKFGQILSDIKWKYRGQINPLNKQMSLDVHISAVKDENGKRIIVGDANLSKDGLRIYEVKDIAICIEEA

SEQ ID NO: 79 - protein, 542 aa, Sh. olleyana
MTISTQNEKLSPWPWQVAPSDASFENAAIGKKLKELSQACYLINHPEKGLGISQNAQVMTESMNSQQDLPVSAFAPALGTQSLGDSNFRRVHGVKYAYYAGAMANGISSEELVIALGQAGILCSFGAAGLIPSRVEQAINRIQTALPNGPYMFNLIHSPSEPALERGSVELFLKHKVRTVEASAFLGLTPQIVYYRAAGLSRDAQGEVVIANKVIAKVSRTEVASKFMQPAPAKMLQKLVDEGLITPEQMELAQLVPMADDVTAEADSGGHTDNRPLVTLLPTILALKDKIQAEYQYKTPIRVGCGGGVGTPDAALATFNMGAAYIVTGSINQACVEAGASEHTRKLLATTEMADVTMAPAADMFEMGVKLQVVKRGTLFPMRANKLYEIYTRYESIEAIPAEEREKLEKQVFRSTLDDIWAGTVAHFNERDPKQIERAEGNPKRKMALIFRWYLGLSSRWSNSGEVGREMDYQIWAGPALGAFNEWAKGSYLDDYTQRNAVDLAKHLMHGAAYQARVNLLTAQGVALPVELQRWSPLDQVK

SEQ ID NO: 80 - protein, 290 aa, Sh. olleyana
LKPPTVIQLFFCPLNTDLLDESTASIVRSWLPEDEVKKVDRFIQQSSREQGLMVRGYLRSVLSRFASVEPQQWQFEYGEKGKPRLTAEQFAQTGLQFNLSHSGDWLLIGVANTYGTAQQQTDIELGVDIERRRETTNIHSILNHYFSKPEESALLALAEDKHRERFFDLWALKESYIKAKGLGLALSLKSFAFDLSASSVGELQVNSETITIQQNVKLSLLKASDSDGLLEDFVIAPQWHCYLGKLDDLYRFAVSVGRASTNSDELPPELKAKKISWLEVVNHAFKPTDR

1. A plant or a part of the plant, wherein the total fatty acid profile in the plant or part of the plant comprises at least about 0.5% by weight of at least one polyunsaturated fatty acid (PUFA) having at least twenty carbons and four or more carbon-carbon double bonds, and wherein the total fatty acid profile in the plant or part of the plant contains less than 5% in total of all of the following PUFAs: gamma-linolenic acid (GLA; 18:3, n-6), PUFAs having 18 carbons and four carbon-carbon double bonds, PUFAs having 20 carbons and three carbon-carbon double bonds, and PUFAs having 22 carbons and two or three carbon-carbon double bonds.

2. A plant or a part of the plant, wherein the total fatty acid profile in the plant or part of the plant comprises at least about 0.5% by weight of at least one polyunsaturated fatty acid (PUFA) having at least twenty carbons and four or more carbon-carbon double bonds, and wherein the total fatty acid profile in the plant or part of the plant contains less than 1% of each of the following PUFAs: gamma-linolenic acid (GLA; 18:3, n-6), PUFAs having 18 carbons and four carbon-carbon double bonds, PUFAs having 20 carbons and three carbon-carbon double bonds, and PUFAs having 22 carbons and two or three carbon-carbon double bonds.

3. A plant or a part of the plant, wherein the total fatty acid profile in the plant or part of the plant comprises at least about 0.5% by weight of at least one polyunsaturated fatty acid (PUFA) having at least twenty carbons and four or more carbon-carbon double bonds, and wherein the total fatty acid profile in the plant or part of the plant contains less than 2% of gamma-linolenic acid (GLA; 18:3, n-6) and dihomo-gamma-linolenic acid (DGLA or HGLA; 20:3, n-6).

4. The plant or part of the plant of claim 4, wherein the total fatty acid profile in the plant or part of the plant contains less than 1% by weight of gamma-linolenic acid (GLA; 18:3, n-6) and dihomo-gamma-linolenic acid (DGLA or HGLA; 20:3, n-6).

5. A plant or a part of the plant, wherein the total fatty acid profile in the plant or part of the plant comprises at least about 0.5% by weight of at least one polyunsaturated fatty acid (PUFA) having at least twenty carbons and four or more carbon-carbon double bonds, and wherein the total fatty acid profile in the plant or part of the plant contains less than 1% of gamma-linolenic acid (GLA; 18:3, n-6).

6. The plant or part of the plant of claim 5, wherein the total fatty acid profile in the plant or part of the plant contains less than 0.5% by weight of gamma-linolenic acid (GLA; 18:3, n-6).

7. A plant or part of a plant, wherein the plant has been genetically modified to express enzymes that produce at least one polyunsaturated fatty acid (PUFA) having at least twenty carbons and four or more carbon-carbon double bonds, wherein the total fatty acid profile in the plant or part of the plant comprises at least about 0.5% by weight of said at least one PUFA, and wherein the total fatty acids produced by said enzymes, other than said at least one PUFA, comprise less than about 10% of the total fatty acids produced by said plant.

8. The plant or part of the plant of claim 7, wherein the total fatty acids produced by said enzymes, other than said at least one PUFA, comprise less than 5% by weight of the total fatty acids produced by said plant.

9. The plant or part of the plant of claim 7, wherein the fatty acids consisting of gamma-linolenic acid (GLA; 18:3, n-6), PUFAs having 18 carbons and four carbon-carbon double bonds, PUFAs having 20 carbons and three carbon-carbon double bonds, and PUFAs having 22 carbons and two or three carbon-carbon double bonds, comprise less than 5% by weight of the total fatty acids produced by said plant

10. The plant or part of the plant of claim 7, wherein gamma-linolenic acid (GLA; 18:3, n-6) comprises less than 1% by weight of the total fatty acids produced by said plant.

11. The plant or part of a plant of claim 1, wherein the plant has not been genetically modified to express a desaturase or an elongase enzyme.

12. A plant or part of a plant, wherein the plant has been genetically modified with a PUFA PKS system from a eukaryote that produces at least one polyunsaturated fatty acid (PUFA), and wherein the total fatty acid profile in the plant or part of the plant comprises a detectable amount of said at least one PUFA.

13. The plant or part of a plant of claim 12, wherein the total fatty acid profile in the plant or part of the plant comprises at least 0.5% by weight of said at least one PUFA.

14. The plant or part of a plant of claim 12, wherein the total fatty acids produced by said PUFA PKS system, other than said at least one PUFA, comprises less than about 10% by weight of the total fatty acids produced by said plant.

15. The plant or part of a plant of claim 12, wherein the total fatty acids produced by said enzymes, other than said at least one PUFA, comprises less than about 5% by weight of the total fatty acids produced by said plant.

16. The plant or part of a plant of claim 12, wherein the PUFA PKS system comprises:
a) at least one enoyl-ACP reductase (ER) domain;
b) at least four acyl carrier protein (ACP) domains;
c) at least two β-ketoacyl-ACP synthase (KS) domains;
d) at least one acyltransferase (AT) domain;
e) at least one β-ketoacyl-ACP reductase (KR) domain;
f) at least two FabA-like β-hydroxyacyl-ACP dehydrase (DH) domains; and
g) at least one chain length factor (CLF) domain;
h) at least one malonyl-CoA:ACP acyltransferase (MAT) domain.

17. The plant or part of a plant of claim 12, wherein the PUFA PKS system comprises:
a) two enoyl ACP-reductase (ER) domains;
b) eight or nine acyl carrier protein (ACP) domains;
c) two β-keto acyl-ACP synthase (KS) domains;
d) one acyltransferase (AT) domain;
e) one ketoreductase (KR) domain;
f) two FabA-like β-hydroxy acyl-ACP dehydrase (DH) domains;
g) one chain length factor (CLF) domain; and
h) one malonyl-CoA:ACP acyltransferase (MAT) domain.

18. The plant or part of a plant of claim 12, wherein the PUFA PKS system is from a Thraustochytriales microorganism.

19. The plant or part of a plant of claim 12, wherein the PUFA PKS system is from Schizochytrium.

20. The plant or part of a plant of claim 12, wherein the PUFA PKS system is from Thraustochytrium.

21. The plant or part of a plant of claim 12, wherein the PUFA PKS system is from a microorganism selected from the group consisting of: Schizochytrium sp. American Type Culture Collection (ATCC) No. 20888; Thraustochytrium 23B ATCC No. 20892, and a mutant of any of said microorganisms.

22. The plant or part of a plant of claim 12, wherein the nucleic acid sequences encoding the PUFA PKS system hybridize under stringent hybridization conditions to the genes encoding the PUFA PKS system from a microorganism selected from the group consisting of: Schizochytrium sp. American Type Culture Collection (ATCC) No. 20888; Thraustochytrium 23B ATCC No. 20892; and a mutant of any of said microorganisms.

23. The plant or part of a plant of claim 12, wherein the nucleic acid sequences encoding the PUFA PKS system hybridize under stringent hybridization conditions to the genes encoding the PUFA PKS system from Schizochytrium sp. American Type Culture Collection (ATCC) No. 20888 or a mutant thereof.

24. The plant or part of a plant of claim 12, wherein the PUFA PKS system comprises at least one domain from a PUFA PKS system from a Thraustochytriales microorganism.

25. A plant or part of a plant, wherein the plant has been genetically modified with a PUFA PKS system that produces at least one polyunsaturated fatty acid (PUFA), and wherein the total fatty acid profile in the plant or part of the plant comprises a detectable amount of said at least one PUFA, wherein the PUFA PKS system is a bacterial PUFA PKS system that produces PUFAs at temperatures of at least about 25° C., and wherein the bacterial PUFA PKS system comprises:
a) at least one enoyl ACP-reductase (ER) domain;
b) at least six acyl carrier protein (ACP) domains;
c) at least two β-keto acyl-ACP synthase (KS) domains;
d) at least one acyltransferase (AT) domain;
e) at least one ketoreductase (KR) domain;
f) at least two FabA-like β-hydroxy acyl-ACP dehydrase (DH) domains;
g) at least one chain length factor (CLF) domain;
h) at least one malonyl-CoA:ACP acyltransferase (MAT) domain; and
i) at least one 4′-phosphopantetheinyl transferase (PPTase) domain.

26. The plant or part of a plant of claim 25, wherein the PUFA PKS system is from a microorganism selected from the group consisting of: Shewanella olleyana Australian Collection of Antarctic Microorganisms (ACAM) strain number 644; Shewanella japonica ATCC strain number BAA-316, and a mutant of any of said microorganisms.

27. The plant or part of a plant of claim 25, wherein the nucleic acid sequences encoding the PUFA PKS system hybridize under stringent hybridization conditions to the genes encoding the PUFA PKS system from a microorganism selected from the group consisting of: Shewanella olleyana Australian Collection of Antarctic Microorganisms (ACAM) strain number 644; or Shewanella japonica ATCC strain number BAA-316, or a mutant of any of said microorganisms.

28. The plant or part of a plant of claim 12, wherein the PUFA PKS system further comprises a phosphopantetheinyl transferase (PPTase).

29. An oilseed plant, or part of the oilseed plant, that produces mature seeds in which the total seed fatty acid profile comprises at least 1.0% by weight of at least one polyunsaturated fatty acid having at least twenty carbon atoms and at least four carbon-carbon double bonds, and wherein the total fatty acid profile in the plant or part of the plant contains less than 5% in total of all of the following PUFAs: gamma-linolenic acid (GLA; 18:3, n-6), PUFAs having 18 carbons and four carbon-carbon double bonds, PUFAs having 20 carbons and three carbon-carbon double bonds, and PUFAs having 22 carbons and two or three carbon-carbon double bonds.

30. An oilseed plant, or part of the oilseed plant, that produces mature seeds in which the total seed fatty acid profile comprises at least 1.0% by weight of at least one polyunsaturated fatty acid having at least twenty carbon atoms and at least four carbon-carbon double bonds, and wherein the total fatty acid profile in the plant or part of the plant contains less than 1% of gamma-linolenic acid (GLA; 18:3, n-6).

31. The plant or part of a plant of claim 1, wherein the at least one PUFA has at least twenty carbons and five or more carbon-carbon double bonds.

32. The plant or part of a plant of claim 1, wherein the at least one PUFA is selected from the group consisting of: DHA (docosahexaenoic acid (C22:6, n-3)), ARA (eicosatetraenoic acid or arachidonic acid (C20:4, n-6)), DPA (docosapentaenoic acid (C22:5, n-6 or n-3)), and EPA (eicosapentaenoic acid (C20:5, n-3).

33. The plant or part of a plant of claim 1, wherein the at least one PUFA is selected from the group consisting of: DHA (docosahexaenoic acid (C22:6, n-3)), DPA (docosapentaenoic acid (C22:5, n-6 or n-3)), and EPA (eicosapentaenoic acid (C20:5, n-3).

34. The plant or part of a plant of claim 12, wherein the at least one PUFA is selected from the group consisting of: DHA (docosahexaenoic acid (C22:6, n-3)), ARA (eicosatetraenoic acid or arachidonic acid (C20:4, n-6)), DPA (docosapentaenoic acid (C22:5, n-6 or n-3)), EPA (eicosapentaenoic acid (C20:5, n-3), gamma-linolenic acid (GLA; 18:3, n-6); stearidonic acid (STA or SDA; 18:4, n-3); and dihomo-gamma-linolenic acid (DGLA or HGLA; 20:3, n-6).

35. The plant or part of a plant of claim 1, wherein the at least one PUFA is DHA.

36. The plant or part of a plant of claim 35, wherein the ratio of EPA:DHA produced by the plant is less than 1:1.

37. The plant or part of a plant of claim 1, wherein the at least one PUFA is EPA.

38. The plant or part of a plant of claim 1, wherein the at least one PUFA is DHA and DPAn-6.

39. The plant or part of a plant of claim 1, wherein the at least one PUFA is EPA and DHA.

40. The plant or part of a plant of claim 1, wherein the at least one PUFA is ARA and DHA.

41. The plant or part of a plant of claim 1, wherein the at least one PUFA is ARA and EPA.

42. The plant or part of a plant of claim 1, wherein the plant is an oilseed plant and wherein the part of the plant is a mature oilseed.

43. The plant or part of a plant of claim 1, wherein the plant is a crop plant.

44. The plant or part of a plant of claim 1, wherein the plant is a dicotyledonous plant.

45. The plant or part of a plant of claim 1, wherein the plant is a monocotyledonous plant.

46. The plant or part of a plant of claim 1, wherein the plant is selected from the group consisting of: canola, soybean, rapeseed, linseed, corn, safflower, sunflower and tobacco.

47. A plant or a part of the plant, wherein the total fatty acid profile in the plant or part of the plant comprises detectable amounts of DHA (docosahexaenoic acid (C22:6, n-3)), and DPA (docosapentaenoic acid (C22:5, n-6), wherein the ratio of DPAn-6 to DHA is 1:1 or greater than 1:1.

48. The plant or a part of the plant of claim 47, wherein the total fatty acid profile in the plant or part of the plant contains less than 5% by weight in total of all of the following PUFAs: gamma-linolenic acid (GLA; 18:3, n-6), PUFAs having 18 carbons and four carbon-carbon double bonds, PUFAs having 20 carbons and three carbon-carbon double bonds, and PUFAs having 22 carbons and two or three carbon-carbon double bonds.

49. A plant or part of a plant, wherein the plant has been genetically modified with a PUFA PKS system that produces at least one polyunsaturated fatty acid (PUFA), and wherein the total fatty acid profile in the plant or part of the plant comprises a detectable amount of said at least one PUFA, wherein the PUFA PKS system comprises:
a) two enoyl ACP-reductase (ER) domains;
b) eight or nine acyl carrier protein (ACP) domains;
c) two β-keto acyl-ACP synthase (KS) domains;
d) one acyltransferase (AT) domain;
e) one ketoreductase (KR) domain;
f) two FabA-like β-hydroxy acyl-ACP dehydrase (DH) domains;
g) one chain length factor (CLF) domain;
h) one malonyl-CoA:ACP acyltransferase (MAT) domain; and
i) one phosphopantetheinyl transferase (PPTase).

50. Seeds obtained from the plant or part of plant of claim 1.

51. A food product comprising the seeds of claim 50.

52. An oil obtained from seeds of the plant of claim 1.

53. An oil comprising the fatty acid profile shown in FIG. 2 or FIG. 3.

54. An oil blend comprising the oil of claim 52 and another oil.

55. The oil blend of claim 54, wherein the another oil is a microbial oil.

56. The oil blend of claim 54, wherein the another oil is a fish oil.

57. An oil comprising the following fatty acids: DHA (C22:6n-3), DPAn-6 (C22:5n-6), oleic acid (C18:1), linolenic acid (C18:3), linoleic acid (C18:2), C16:0, C18.0, C20:0, C20:1n-9, C20:2n-6, C22:1n-9; wherein the oil comprises less than 0.5% of any of the following fatty acids: gamma-linolenic acid (GLA; 18:3, n-6), PUFAs having 18 carbons and four carbon-carbon double bonds, PUFAs having 20 carbons and three carbon-carbon double bonds, and PUFAs having 22 carbons and two or three carbon-carbon double bonds.

58. A plant oil comprising at least about 0.5% by weight of at least one polyunsaturated fatty acid (PUFA) having at least twenty carbons and four or more carbon-carbon double bonds, and wherein the total fatty acid profile oil contains less than 5% in total of all of the following PUFAs: gamma-linolenic acid (GLA; 18:3, n-6), PUFAs having 18 carbons and four carbon-carbon double bonds, PUFAs having 20 carbons and three carbon-carbon double bonds, and PUFAs having 22 carbons and two or three carbon-carbon double bonds.

59. A plant oil comprising detectable amounts of DHA (docosahexaenoic acid (C22:6, n-3)), and DPA (docosapentaenoic acid (C22:5, n-6), wherein the ratio of DPAn-6 to DHA is 1:1 or greater than 1:1.

60. A food product that contains an oil of claim 52.

61. The food product of claim 60, further comprising the seeds of claim 50.

62. A pharmaceutical product that contains an oil of claim 52.

63. A method to produce an oil comprising at least one PUFA, comprising recovering an oil from the seeds of claim 50.

64. A method to produce an oil comprising at least one PUFA, comprising recovering an oil from the plant or part of plant of claim 1.

65. A method to provide a supplement or therapeutic product comprising at least one PUFA to an individual, comprising providing to the individual a plant or part of plant of claim 1.
